United States Patent Application Publication US 2025/0161374 A1 - sequence listing, part 2

SEQ ID NO: 3 - DNA, 3037825 bp, Bacillus coagulans (residues 1,518,914-3,037,825 of 3,037,825)
  misc_difference 6889..6988: note = n is a, c, g, t or u
  misc_difference 47467..47566: note = n is a, c, g, t or u
  misc_difference 61054..61153: note = n is a, c, g, t or u
  misc_difference 76272..76371: note = n is a, c, g, t or u
  misc_difference 82985..83084: note = n is a, c, g, t or u
  misc_difference 151512..151611: note = n is a, c, g, t or u
  misc_difference 172312..172411: note = n is a, c, g, t or u
  misc_difference 197425..197524: note = n is a, c, g, t or u
  misc_difference 227463..227562: note = n is a, c, g, t or u
  misc_difference 307213..307312: note = n is a, c, g, t or u
  misc_difference 322214..322313: note = n is a, c, g, t or u
  misc_difference 410874..410973: note = n is a, c, g, t or u
  misc_difference 432862..432961: note = n is a, c, g, t or u
  misc_difference 467951..468050: note = n is a, c, g, t or u
  misc_difference 477885..477984: note = n is a, c, g, t or u
  misc_difference 489928..490027: note = n is a, c, g, t or u
  misc_difference 492311..492410: note = n is a, c, g, t or u
  misc_difference 495640..495739: note = n is a, c, g, t or u
  misc_difference 500911..501010: note = n is a, c, g, t or u
  misc_difference 501564..501663: note = n is a, c, g, t or u
  misc_difference 501837..501936: note = n is a, c, g, t or u
  misc_difference 505086..505185: note = n is a, c, g, t or u
  misc_difference 527873..527972: note = n is a, c, g, t or u
  misc_difference 530643..530742: note = n is a, c, g, t or u
  misc_difference 567235..567334: note = n is a, c, g, t or u
  misc_difference 586317..586416: note = n is a, c, g, t or u
  misc_difference 605673..605772: note = n is a, c, g, t or u
  misc_difference 629225..629324: note = n is a, c, g, t or u
  misc_difference 657578..657677: note = n is a, c, g, t or u
  misc_difference 717390..717489: note = n is a, c, g, t or u
  misc_difference 730327..730426: note = n is a, c, g, t or u
  misc_difference 770161..770260: note = n is a, c, g, t or u
  misc_difference 795667..795766: note = n is a, c, g, t or u
  misc_difference 805480..805579: note = n is a, c, g, t or u
  misc_difference 870294..870393: note = n is a, c, g, t or u
  misc_difference 922059..922158: note = n is a, c, g, t or u
  misc_difference 936419..936518: note = n is a, c, g, t or u
  misc_difference 949603..949702: note = n is a, c, g, t or u
  misc_difference 1002031..1002130: note = n is a, c, g, t or u
  misc_difference 1002727..1002826: note = n is a, c, g, t or u
  misc_difference 1054247..1054346: note = n is a, c, g, t or u
  misc_difference 1136430..1136529: note = n is a, c, g, t or u
  misc_difference 1167917..1168016: note = n is a, c, g, t or u
  misc_difference 1173346..1173445: note = n is a, c, g, t or u
  misc_difference 1214137..1214236: note = n is a, c, g, t or u
  misc_difference 1226595..1226694: note = n is a, c, g, t or u
  misc_difference 1236944..1237043: note = n is a, c, g, t or u
  misc_difference 1306297..1306396: note = n is a, c, g, t or u
  misc_difference 1334053..1334152: note = n is a, c, g, t or u
  misc_difference 1366476..1366575: note = n is a, c, g, t or u
  misc_difference 1376091..1376190: note = n is a, c, g, t or u
  misc_difference 1410061..1410160: note = n is a, c, g, t or u
  misc_difference 1459974..1460073: note = n is a, c, g, t or u
  misc_difference 1467508..1467607: note = n is a, c, g, t or u
  misc_difference 1519137..1519236: note = n is a, c, g, t or u
  misc_difference 1520213..1520312: note = n is a, c, g, t or u
  misc_difference 1602768..1602867: note = n is a, c, g, t or u
  misc_difference 1608992..1609091: note = n is a, c, g, t or u
  misc_difference 1617923..1618022: note = n is a, c, g, t or u
  misc_difference 1619560..1619659: note = n is a, c, g, t or u
  misc_difference 1642073..1642172: note = n is a, c, g, t or u
  misc_difference 1686939..1687038: note = n is a, c, g, t or u
  misc_difference 1730483..1730582: note = n is a, c, g, t or u
  misc_difference 1757990..1758089: note = n is a, c, g, t or u
  misc_difference 1781447..1781546: note = n is a, c, g, t or u
  misc_difference 1808695..1808794: note = n is a, c, g, t or u
  misc_difference 1855832..1855931: note = n is a, c, g, t or u
  misc_difference 1923516..1923615: note = n is a, c, g, t or u
  misc_difference 1948888..1948987: note = n is a, c, g, t or u
  misc_difference 2020632..2020731: note = n is a, c, g, t or u
  misc_difference 2025854..2025953: note = n is a, c, g, t or u
  misc_difference 2068060..2068159: note = n is a, c, g, t or u
  misc_difference 2084469..2084568: note = n is a, c, g, t or u
  misc_difference 2114719..2114818: note = n is a, c, g, t or u
  misc_difference 2126824..2126923: note = n is a, c, g, t or u
  misc_difference 2187352..2187451: note = n is a, c, g, t or u
  misc_difference 2228980..2229079: note = n is a, c, g, t or u
  misc_difference 2440221..2440320: note = n is a, c, g, t or u
  misc_difference 2443328..2443427: note = n is a, c, g, t or u
  misc_difference 2460637..2460736: note = n is a, c, g, t or u
  misc_difference 2484389..2484488: note = n is a, c, g, t or u
  misc_difference 2516462..2516561: note = n is a, c, g, t or u
  misc_difference 2523992..2524091: note = n is a, c, g, t or u
  misc_difference 2613846..2613945: note = n is a, c, g, t or u
  misc_difference 2621437..2621536: note = n is a, c, g, t or u
  misc_difference 2688754..2688853: note = n is a, c, g, t or u
  misc_difference 2701926..2702025: map = n is a, c, g, t or u
  misc_difference 2799919..2800018: note = n is a, c, g, t or u
  misc_difference 2822278..2822377: note = n is a, c, g, t or u
  misc_difference 2961317..2961326: note = n is a, c, g, t or u
  misc_difference 2962604..2962613: note = n is a, c, g, t or u
  misc_difference 2963654..2963663: note = n is a, c, g, t or u
  misc_difference 2964755..2964764: note = n is a, c, g, t or u
  misc_difference 2965962..2965971: note = n is a, c, g, t or u
  misc_difference 2977651..2977660: note = n is a, c, g, t or u
  misc_difference 2978662..2978671: note = n is a, c, g, t or u
  misc_difference 2981477..2981486: note = n is a, c, g, t or u
  misc_difference 2983142..2983151: note = n is a, c, g, t or u
  misc_difference 2984853..2984862: note = n is a, c, g, t or u
  misc_difference 2988372..2988381: note = n is a, c, g, t or u
  misc_difference 2989238..2989247: note = n is a, c, g, t or u
  misc_difference 2991592..2991601: note = n is a, c, g, t or u
  misc_difference 2992391..2992400: note = n is a, c, g, t or u
  misc_difference 2993038..2993047: note = n is a, c, g, t or u
  misc_difference 2993984..2993993: note = n is a, c, g, t or u
  misc_difference 2995000..2995009: note = n is a, c, g, t or u
  misc_difference 2999222..2999231: note = n is a, c, g, t or u
  misc_difference 3001588..3001597: note = n is a, c, g, t or u
  misc_difference 3002134..3002143: note = n is a, c, g, t or u
  misc_difference 3002692..3002701: note = n is a, c, g, t or u
  misc_difference 3003589..3003598: note = n is a, c, g, t or u
  misc_difference 3004241..3004250: note = n is a, c, g, t or u
  misc_difference 3005042..3005051: note = n is a, c, g, t or u
  misc_difference 3005588..3005597: note = n is a, c, g, t or u
  misc_difference 3007905..3007914: note = n is a, c, g, t or u
  misc_difference 3025703..3025712: note = n is a, c, g, t or u
  misc_difference 3026358..3026367: note = n is a, c, g, t or u
  misc_difference 3028152..3028161: note = n is a, c, g, t or u
  misc_difference 3032565..3032574: note = n is a, c, g, t or u
  misc_difference 3034721..3034730: note = n is a, c, g, t or u
  misc_difference 3035952..3035961: note = n is a, c, g, t or u
  misc_difference 3037119..3037128: note = n is a, c, g, t or u
  source 1..3037825: mol_type = genomic DNA
ggcattgaattggatttggctggcaaaactttatcagtggaacatgtggactttgcctacgaagatgcgccggatgaccccatcctgaaagatgtatcatttacggcaaaaccaaatgaagtcattgcttttgcaggcccttccggcggcggcaaatcgacgatctttagtttgcttgaacgtttctatgcaccaacaagcggatcccacatttcgcacgtctnnnnnnnnnnnnnnnnnnnnnnnnnnnnnnnnnnnnnnnnnnnnnnnnnnnnnnnnnnnnnnnnnnnnnnnnnnnnnnnnnnnnnnnnnnnnnnnnnnnnttacgtgcggaatatgcgtttagtttgcttgaacgtttctatgcaccaacaagcggatcaatcaaatttggggatacggatattgaagagatcaatttaacaaattaccgcagccaaatcggatacgtttcacaagattctgcgattatggctgggacaatccgcgacaatttgacgtatggattagacggtacatatacggatgaacaactttggaacgttttagatttagcctttgcacgcaaatttgtcgaagaaatgcctgacaaacttaacacagaggtaggggaacgcggggtgaaaatctccggcggccagcgccagcgtattgccattgcccgggcctttttgcgcaatcccaagattttaatgttggatgaagcaactgcgagtcttgatagtgagtcagagatgaaagtccaggaagccttaaccaacttgatgaaaggccgcacgactttagtcatcgcccaccgcctggcaaccattgtggacagcgacaagatttactttatcgaaaaaggccgggtcacaggatcaggtacacatgatgaattggtacgtacgcatgaaacgtatgcaaaatacgtggctgaacaatttaaggtagacacaccggctatgtaaagaagtattcacgatacagtgtaacctgaatctgtgacgaaaatataacaaacgccgttaataggtagatttcccaagagtaaggatatagtggtgtccgactattcgataaatgcacttttagtgattcagtatgtaaaaatttccctagatcacctgaatgtggaatgaatttaatttgtctgatataccaattatactaaattttatgcgatttgtttgcctttaagcggaaatttcgtcacggattcaggtgatcaaactatttggttggctcattttccaaccaattggatggagaccaaatggcttcttcccggtaagataataacctgaatccgtgacgaaannnnnnnnnnnnnnnnnnnnnnnnnnnnnnnnnnnnnnnnnnnnnnnnnnnnnnnnnnnnnnnnnnnnnnnnnnnnnnnnnnnnnnnnnnnnnnnnnnnnattttggcaaaggctctaaaaatgcatcagcgctttaaactgtttcacatttcttctgcttaccggtatttccgcgtccatcccttttaaacggagcaaatacgtctgattgaaccacggcacaatttcccggatcttcgttaaatttacaagataagaccggtggcagcgaaagaaaagatcctcaggcaaaagggactggaactcggatatcgccatgggcatttcaaacgtttcctgttgtgtataaacaagcgtgattttttcctgagcggcgcagtaaaaaatatcgtttgcatccgccacaataattttctctcccttgcgcaaattcacccgctctttccggtgaagcccgccatttcgcggcacagccccttcttctcccggcaatggatgctctcttttatacgcagcctcaagccttttcaacatggcggcaattcttttttcttcatatggttttaaaatataatcaaatgcttccagttcaaaagcctgtacggcgtgttccttataagccgttgtaaaaataatatacggtttatgcgcaaatttgctgatgcttcctgccagcagcatgccgtccagggaaggaatattaatatcaagaaaaatcgcatctgtttcatgttcctgtaaaaatttcagcacatccagcccgtcttcaaaacaatcggtaatctcaatcccgctgtacgtttcaatcaaatacgccagttcttcacgtgccggtatttcgtcttccactataatggctttcatattctcccaccttcggaacctcaaaataaacttctgttccgggattcagccttctgatggccaggccgtttccgtaaatcagtttgacacggcgatggacattataaaggccaatctgtgtgaccggcatattatcctggtaaacatgctcaatcacttcttccggaatgcctgcccctgtatccgccacactgatgcggactttatttcccacctccttgacggagatttttacgatccccggcccttttacttttaaaatcccatggttgattgcattttccacaagcggctggataatcaggctcgggatcagcacggatacggcgtcaatctcatattcaacctgcaggtggctgccgaatctcgctttttcaatctcaatatagtcgcgcacctgctgcagttctttattgatatcaataaaatcatcagccaattcaagattatagcgcataaaaccggataagttcatgattaattttcttgctttatcgggatttctgcgggtcgtggaggcaatcgcatttaacgcgttaaacaaaaaatgcgggttgatttttgtctggagcgccttccactccgctttattggcttcttctttgatttcttcgatgcgcgaaatttccatgagcgtcgaaatcatctgggcaaggccgattgccattgtctgcagggagtaggtgattttgttcgcttttttataataaatttttaatgtgccggtgacttcatcccgctcctttaacggaataatcagcagacactggatctgcggggtctgctggtcctggatatggttgcggatcgtaatttccccgcttttgatcgcagtttttgtcagatcactaataatttcatggccgatctggtacctttcctgtccgaagccgacataagccaggatttttttcttatcggtgatggcaactgcatcggcgcggatctcatttttaatgatggcgcagattttttccaacgattctgcattgatggcgcggaaatacggcatggttttattggcaatatcaagcgccagttttgcctgttttgccgccacaaattccttctcgccctccacgctcttaatcagcaggacaatcaatccaatattgacgtcgcccgcgatcatcgggaaggcaattttggacacaatatccaccccggtgctgaacgggtgggcaaaaacaagaatcaaaagcatcgttaatatttcacaaaacatcccggctgcgatcccgacgaaccagcgccaggaatttttcactttcctgctgatcaggccggaaatgacgccggctgtaatactcgtaatcaagcacggcacggaggtaaccccgccaatatctattaaataacggtgcaacccggagacgatgcctgtgataatgccaacccacgggccgaacaggataccgccggatacgatggcaataatccgcacattgacaagggacccgtccaccttaatgcccgagtaagtcgcaaagatggcaaaactgcaaaagactgcagtgataaaactcaattcaaaaacagacggctgctcctgttgaaagatttctttaaaacgcggaattctcgtgataaaaaataagcaggttaataaaagggaagccctctcaaatatttccagcagcatttcaaatgacgtttccaccgtgctacctccctcgcgaatgccggaaaccgcccctttaaggccgggcctggcgcctgttttttcatgtttcctaactccagtttactcgattccccgcgcagttggtatgaaatttaatggaatttatggcggcggttttttgtaaacgcagaaaccccgttctatatagaagacaccggctgaaaaaatgccgggaaaacgctgcaaacgcgggctgtgcagcaggatgctcaaacgcatcgaacggcaaaaaaaattgcaggcatcccctcccgcaatctttcagccgttttccggcgcgctttacccccaatcctgtgacaaatcataagcaagcggcgtttcaatgatctttttcacttcagcgggatcatccgttttgccaagcgcccacattagtttcggcacgatcgcttccgtattcatatccccggaaacaatcaccggatattgcgcgacttttcttccgacttcatacaaatacaaatcatgcccttcttccaagcattgcgtcgaaatcataacaacaatcccggcatcggtcaattccttgatttttggcagcaagttgcgcccttcaaacggcaccccgccgttcccgaaactttcaatgatcaccccgcggtaatgttcctttaaaaaatcaaaaatctccggctttgtgcccgggtgcaattttaaaagaaagacatccggtgacaggcttgtctcaatatgaaacggctgctccggcggttgtggcctccaatgataatgcacctcgtcccctgctacataagccacatacggatgattgatgctttcaaacgcatcgtagcttttcgtccgcattttcaccgcccttgtgcccatgatcacgcgcccgtcaaacacgacaaaaacgccgccaatctcctcgcaggcaaagcggagggcgttgaaaagatttttcttggcatcggtctttttaaaactgatcggcacctgcgaacccgtcagcacaaccggcttattcaggccctgcagcatatacgacaaggctgccgacgtatatcccaatgtatccgttccgtgtgtaatcaaaaaaccgtcatactgttcataatgttccgcaactgcttttgcaatctgcacccaatgttccggctgcatgtttgtgctgtcgcggttcattaatatctttgcggtgacatcggcagacaaagcagcatgctgaaaatatttcagcaagtcttctcccgaaagcccgggtttcagcccttcatccccctcaacggaagcaatggtcccgcctgttgccaagagcaaaatttttttcatttgtgccaccttcatttctaactgtctcggaaaccaatatagcttattatatgatttttgcggttcccgttcaattttttgtctcgcctctaaaagctttttcaaacatgcctatgtttttgatacgggcgggccaaaaacgttatctctgcctccggtaccattcgccctttccaaaagccttgatggttcatattctgttagaaatgtacggcatcaattgatgagggagtggggagtttgagcccgaatttagaaaagtttgttgaccgcctgccgctcgcggaaaaaatccggccagtgcgggaagagggcgggatcgcatattatgacgtcacaatggaagaattttggcaaaagctgcaccgggatttaaggccgacaaggttatgggggtacaaccgccgctttcccgggccgctttttgacgtgccgcacgggaaaaagatacgggtgaaatggacgaatcatttgccgcaaagacattttctcccgattgaccccaccatcttagacgggatgggaacggactttccggaagtgcggaccgtcgtgcatctccatggcggggaaaccaaaccggacagcgacggctatccggaagcctggtttacgcgcgattttaacgaaaccgggccggcattcaaaaatgaagtttatgagtattcaaacaaacagcgccccgccactttgtggtaccatgaccatgcgatcggcattacgcgcctcaatgtgtatgcaggcctggccggcatgtatatcattcgcgatcaaaaagaaaaggctttccatctgccatccggcaaatacgaaattccgctgcttctcacggaccggacttttaacaatgacggttcccttttttatccgcgccagccgcaaaatccggggcccggaacaccggatccatccgtcgtgccgtttttcctcggcgatacgattcttgtaaatggaaaggtatggccctatttggaagtggagccgcgaaaataccggttccggattgtcaatgcgtccaacacgcgggcctatcagttgtaccttgattccggccaggctttttaccagatcggcacggacggcgggctgctaaggcggccggtgcaagtcggaaatctggcactggaaccggcagaacgggcggatttgatccttgatttttccgaatatgccgggcagacgattttactaaaaaatgacctcgggcctaatgccgatccggccgaccaaaccggcgatgtcatgcagtttcgggtcgtgctgccggtttccggagaagacacaagccgcattccgccgtccttgtcttccatcccggttccttccagccaaaacgtgagcgccatccgccatttaaaactgaccggtgcaaccgattcatacgggcgcccgctattgcttctggacaaaaaaagatggatggatccggtgacggaaatgccaaggctcggcacaactgaaatctggtcgcttgccaatacaacggcttttacccatccgatccatatccatcttgtccagtttcaaattttggaccgccgcccatttgacttggacttgtataacgaaacgggccaaattgtatataccggccctgcgaccccgccggaaccgaatgaacgcggctttaaagataccgttgccgcaccgggcgggcaaatcacccgcgtcatgatgcggttttccccgtatgccggcgactacgtatggcactgccatattctcgaacacgaagactacgatatgatgcgcccgttccaagtcatcgatccggatctcccagagtcagacagccccctttcggattaaaggctgctaacaaacgaatgaaacccaaccggtttgcaaggccttgaacggacggggatttacgaatcgctttttgaataaatcaagcccgaaaccccggtttcccggataaatcgtaatagaatgccatttatccgggagccaaaaaaccggcaattaaaaaaaatgtcacatgcaattttggccatcgtctgttatactaaaaatggaaagcggattcattctgttatttttttgctgtatatatactacttgaccaaatcattcatttggtcaaaaaagggagggggttgcaatggcagacaggaaaaagctgattgtggaagcagctgcgaaatctttttctgaattcggctacaaagcgactacaatggaccatgtagcaagaagtgcaggcgtcggcaaaggtacaatttatactttttttaaaaacaaagaagaactgcttcaattatgacgctgattcaatttttggttacgtttttgcaaaatcccggcagattccttgccattgttattttaatcctgcagctgacgagcagcgccgggacttttccattggaagtcattccgaaattcatccaatggtttaacccgctgttgccgatgacctacagcgtgcgcggatttaaagcggttgtttccagcggagagatgggtgtgatgtggcaaaacgccggcatcctgctgatttatatcgtaggtgccgaagtcctcaccctgttgtactttgtcatccgttaccgccgccagtacggacagttgcataaacatacagtaccggaagaagtttaaagatttgatgccgggttctgggatttttccggccggctcataacaaatttaacaggctgcccggcgagatggccgggcagccttttttccagcccgctccgattccggaagcaatctgttgattcttttagataccgctggttttcggggcgtgctgccagttttttggataagcttgctgtttttcagtattccttcacgtagaacgctcgatgtgaagaaaggctggggcttttgccgggtttattcacgtatggactctctgcgtgaaggaatcaatgcctttttttccgaatattttaacacaggggcgttctatgcgaagcatccgaatttccggcccatgtcatatctcttttccgcccgcccatctttttttcaaatcttctacaagcaaatcggcaaggccttcctggtaccccgcttttttcttcaaccgcatttcatttgccactaaaagcagttcaggggattgaaccgcatccagcttggaaagccgggcggatatatcctcttccgacagaacccgcaagtatgcatccgggtccatccgccaaaataccgtttgcccgggaaaacggttgctgaggcgctccgccatggcaacgccttccggatcgagatcgcccgaataataaaaagtacacccgttttccgcaagacgctgcagcatgatccaggcagcagtgcggaactggccatgcgtgcaaatcacaggcgcatcgggcacttcatcaagcacggccgaagccacgccggaattctcaatgatccagactttttttcccacccgcggccaaatgttcgtaagctgcaataattctttcaccgggacattcatgaccgtccctgcagcagctgcttcccgccagaccgggtgcaggccgttttccgtttccgccaaaaatgcgcggcacgtcacaaaactccataagtcatcccgcatcagcccggcatttgcgtacagttcgttcaattcttccgtcgttttcggcatctcttcgatcagccctttcaacaattggctggtgaacaaacaatggacaaagagcctgccttcgaaacggttctggtcaaaaaaatgcgggttccctgtcacacgctgggaaaaaaacggaattcgttcatatttcccttcttccggcagcattgtggaagctttcaagacggttgtgagctgttcggacaacgtatccggatcctgcttgtacgcatgccagataaaacgcgtgtcagccgttttaccggcaatccggcgccaccaccagtttccgcccggcatcgtctccgccagccgcgccaaaaactgttcctctttctttttctctatttccccttcttccgctttggaaaaaattttttccctcaaaaccgcttcaagcagctcaaccagggtgtacttgccgaaaacagtcggcgccagcgccttttcaaatgcccgcagcgaaattttgtttttctctctgagcaaatcaggggacgtgccggcaagacctgcaatcgcctccagttcagtgcgcgtaaaaccggcaagactgatggttcccccgatatggccgagcgaacggtatttttctttaaaaaggcggaacagtttcatcatccccggttccttccttaacagatcgatcgcatcattcatccttcccaactccttttcacaagctctctcccgacatcttgtttcccgcttccggaacctcttttacaccggtcaaaagaagccggaatggttttccatcccggccgtacactggcaagtctatgcttttcaaagccggtccggagctcccgccaatgcttcttccggtttttccactatcgaccgtttatgcccgtcccaccggtaacggatcacggtgacaaaattggcgtttttcgggcggacaagctcgcaaatggcaaggctggaaatggtgtcatagtcgccccagagcgcctgcgaattcataatataattgaatccgagctgctcgacgacttcgaacatgtcgcggatattgttttcatccaccccggcaaacgcttcgtccagcgaaatgatatacggcgccatacttcctgcctccaaataacgcgaatatgctgcggtaaagagcggaatatacatggccattgccttttccccgccgctgaatttaaaaaatgcagtattgctcagctcgcgtttcggctcgccggcacgtttgtatgacaacacgaattggaaccatttccggtaatcgagcacttcttttaaaacttgatggagcgtcgacccttcattgcggatttcaatcagttctttggcagccgcaatccgcgagcggaagtgttttgtaatccggtttaaatcgtcctcgtttaaaaacttgctgttgcgctgcagcaacgcgacaagatctttcgtgtcgagctcgtcttcggactccgccgttttttctttccaggcaatcgaaaaagtaagcccggacgaattatcccggtttctcataattgcgtccatttctttcacccacttggctgcccgctggatccggttccgcaggatgacgccgaccgtattgacgataatatcctcgtacagccttctgtcctgctcatccaaataactttgcaagtttaaaagttctttttcaagagactcgagtaccgtatacgggctcaccctgcggccgcggtattccatctggatgaggcggcggccccgcaaaccttcccattcctttttgaacgtttcgtaatagtcatcgagtttttcagcgaaccattctggcggatccgcttcttttgtaaactcggacatgcggtactctgttaaattcgactgttcgttgaaaaaaatttttgtcaggttttcatttaattttgcgcggtcatatttttccagcacgccggaaaacgccgccaaaatgctttccggttccgtatctccgctttccacgaagccgagtgaaagctcttcttttacgagtttctcccattccgcggccatatttgcccaaaatgtggcgcgcgttttcgcaagagacaaatcggctatgcacttttcaagttctgcttcttttttcggcttcgtttcgtaaatatccctaattttttcgtccgtacttgcatattcatgctggactgcctgaatccgggcgcggacctcatcaatgccttgcaatttcagctgctgctcaatcgcttcgatatctgccgctgttttctcccattctgaccggcggacgttctcttcaccgcgaatttcatcaagttcctgctctttttcaaagatatccgcagtaaggcgcgcgagcattctgcgcccagaaaacaaatgttgaaaagtgagctccaggttgtgaagatgttcttcataacttttcgcagcagccagcgcttcatcgagcgggccgctttgaagtgcaagattcaggccggccccttgctcatgcaattgcagccggatgttttgcaaatcctggtatacttgtttccattcgcggtcaatgtcgcgcagaaattcctgttcctgcttcaggatgcgcgccgttttttccatctgttcttcaatgtcgcgcaaatctttgtcatccggaatgcccgctttccaatcttctgcttcctgtactttgccggcccagtctaaaaggctgttttccatttgcaaaagagcaaggcggatttcagcaatcttttgctctgtttctttgattttttcctgctggtaccgtttccgggacgttctgccgataaatttggaaggcccttcatccgaggcatggccaacgaggcagccgattgaaaaagagccatccgcgtcaatgtgaaaaccgctgtccgatggttcaagcggaatgctgcgcagcacttcgtcaatgcgcgcggctgaaaccgggccgtcgtcatccggatccggctttaagtaatcggcaagtgtgtatccgagaatgtgcgggttcgggcggatgacccggtcgtggacaggcgtaaccggttcttccgtaatcaggctgtccaaaatccccgtctgccggagtgccgcttcaattctggctttttgggcatcggtcacatgatcctggaattccaccgcggcataaaaggggagatagtgttgccctgattcatggagacgcgcacggaaagcctccgtatctgcggggcgttccgggttggcaagtttcaagttttgccaatacacaagcgtttcttcggcttcggccaattcccgctcttttgcctttttctcctgctccgcgcgtgaaatttctgtccgcacttgcaaaatataatcatttgccgcgtccacaatttcttccctgaccgcttcataacggttttcttcgtacagcccgtccagcgctccggcaatacgccggagccgctcgtctgtaaaagagagggccggatgctgttcaatccacaaaaacacggcatcttccagctcctgcttttgttcggtaaaccagttttccaaatggtcgagttgtttccggagttcgtcaatttcctgctttttggcagatgactggcgctgcagtttcagatgcgcttcgtgaagccgctccgcttctccggccagttgccgcagcttttgcaaaagtccgctgtgctgtttagtttcccgcttccaaaccgaaaaatcaaaagcttccccctcatgccgcgaaaaatccccggcgtttatcccgtgcccggtaaaagctgcatccccggcatccagtgccagttcatccagtatctcctgcatactggattcatccttgctgttttctgtttccaaccggtcctgctccaggcggatttccaaaagctgacttttctttgcttcccactttttctccagatccgctgcttcactttttaacttttcagccctggcctgtttctcccctttttctttctcaaggcgccaaacttcatggtgctgcagccgttcctgttctgcttttaaaacgtcgcgtttttgttcgtaatgctttttctcttcttccaggttttcaatcatgccgtgcagtgattcagagcgggtttctaacgtgccggcgtcctgcttggcgtcctgcagcctgctttcggcctcccgccatttttgtgcgcgttccgctaaaatatattgattgtaaagatcgtattggcgcaccagtttctttgccgattcgtgctcccgttcaagctgctcaagctgctgctccgtttcgtccatgctttcaatcgtgtcagacaaatggcggagctcgtcatccgtcaaaggcggcagcgcggactcgaggatttcataaatgaccgtcggcttgaaatcttttgacagtttcgggcttctcagctgaatcaaaagcttgattaaatcttcaaaggcttccatcgactgaaaaccgaaaatatatttgttcaccagttccatatattctttctgcgagtggacgagatacccccccggacccgatccggttttcaagctcttttgcagacaacgggatccgctctgactggcgggtgtgcgccagttcaaaatcgtagccgatcctgcggttgtcggtcaggacgaaataccatgattttaacgttttatgccgctttgcctgcatgccgatgcccgttgtgatatactgctttgtcccctgtttttggtattccagaaacaagtagccggtccgctcgtcatggccggacacttccttttccccaagcaggtaatcttccatcttccttgcttttgacccgaacggatcaagccggtcaggcgtcttttttccgtccagcaaaaccggtaaaatgctttgcatcgtcaccgatttccccgaaccgtttgtgccgcgcaacaacagctttccgtccgcaaattcaaaaatttcatcgtcataataccaaaaatttaacaggccggcgcggttcatcacccattttccttctgtcacggttgctcatcccctttctcaaaatcagccggatacttgcctgcaagcacgcctaacagcggttttatccggatcagccccgccgcttcatccgtttccgccatcatccattctttcatcgtttcgaccaattccgcacataccgcctttgtgccggcgtcccggaaatgtttcggccatccgcgttcgaggcgggagcgcatctcgtcaatgaccgcttcaaattcgccttccgtaagcaaaatttcccccgcttcattcggaacgtatttttccgggtggtcatgcagcgtctttgacaactgcagcatcagatccgtagaaccttttgcattcgggtaaacatggtggtaactccgcggttctgcggcagataaaaaggctgtgtttttaaaaacatggagtttataacggctgtgttcttcaatgtcctcaaaaagccggttgcggaaattgcggatataaagaaaatcggggtcctgcgtatctttccggtgcaggccaggggagaaaaacaatttccggtacacccgcttgcgccgttcatcttcctgattctgtttccagtcttcttcaaggagcccggtccagtccgcataacttgtaaaatcatccggaaagcttcttagaaaatagcggctgtaaacggtcgcttcatataggacttcctggtcttcgtaagtgtcaaacctggaaatatcgccgtctattgtccggatcagatggaattccatcagtgcctggaccgcccggatgagcgacttccggtgaagataaagcgtccagtccagcccatcttccacaggataatcgttttggatctcctggcacatctccgacaagaggaactgttcatccaccgcttttccttccagaaaagaaagcgcgcagcaaaaaatcgcataatccatcggctcctgaaaatgcaggatgcccatccagctttccggttccaccgggattttttcaagtttgataaaatgctggtggatgatcagcctgagcccgaatttctcgctgatgtaacggcgcagcactttttcgcgctcgcggatgagctggtaccagtccgggtgctcagaccgcaaaatccagtaatgatggaataacaggtccatcccctgcaccgctttttcatcaaaaacttgtaacggatccatcagcgttctcctcctgacagttcaaatatggcatccggtgccatccccgtgcccatcagttcgccgcggataaaccgggctatcccctgtactcctttttcagccaaaatatgtaccgggttcatcagcgctctcctcccgataattcaaatacagcatccggcatgatcagtttcccgtcttctgcatccagtgtgatgatccgatccgggtcaatcacaacttttacggacatcccgtaatccgtttttacttcatggtttttcgctgccatcgattttccgatccagccgagcagcactttccggacaaacggctccactatcccgatttcagcaaggcgaatctccccgtttttcatatatttttcaatcagctgcttttcctgttcgcgctcttttaaataggcgagccgctgcttttctttctgctcatggttagaacggaaagcgcctggctttgttttctcgcggtaccggttcgttcgcggcttgatttcccgcatctccggctgttcttcccatgtctcggcatgaagattgtccgttgtcgcctcctccaggtgcaaatgccgtaccgtcatcgtcccgaacacgacggatgacaattgatgggcctcttccaaactatggcacccggcaaaccatttggaaaggtgcaaataatcttttttccggctccggaaatgttgctggcgttcactgatccgctgaacataacgggccatcctccggatcatttcatttgtctgcatctgcagcatttccagttcactttgggaggagctggccccaagaaaccaccgccgcaaagactcccagtattcccggaattcttccagccattcttgtgcggaagcagccgtatcttccaagcggggaatttggcgcctgtgttccacgagtttttcaaaaagcggcgccaatatatgcgtatccagttcccgcaacctttcccggatttgcagcgatgttttttgcaacgagacgataaaatcacgcaaataagccgtgaattggtttttatatacgagaaaggcttccgtctgcatccgttgtgatgtcttttcgctattgatataggctatgtaatccgctgtatttgtccggatggtcccgaaaaagtgaaaaatgtcatcccaaatgtgcatgtagtgggctgcaggtttgtccaacggctgtttcagttcttcttccagttttgccaaagaggcgagcagacggtcaaattgcgaacgttcgagcgatccctggaactggtcccccagtttttcaagctggatcagcatccgctcgatttccactgtgtaaggcgtacactggtagcggaatctttttttcttatattcttcgatggttttggcatttgtcatatcctggcgggcaaccaggttattccattttaccagctgggccaactgctggtgcagctgttcttcttcataatcgtgaaaagccgggagcgagcgcaaatattcgagcacttcctccggcgaaataaagtcgcgcatcctttcatgctgcctgtaaaagaagcgcaaaatcacgcggtactgggcagcagaatccgccgtcagataactcgcttcgacaactttcttcatgatctggtccattcgtttcaccacgttttggtcgtattacttctattgtataagatttgcaggaattttgacatggaaaatatgtttttgcaggtttggagcgggctgagcctttcgtgcacatgtactttttatgcgggaacagcaaaggctgccggtaaaatttcggcagccttttaggttacagacacctttcccctgttgattttcctcaccaccgcaatgatgagcctgcaaatgaaaaatttgcccatcatactgaaaaaagaatgataccatgtccaccctttcttctggattttatggctgttaaatgcaagttctctacctcttttctgcctttaattttactttctatatttatatcggcagaagcgatggtttttagagatggatggaaaccacaaatttgacaattttggtaaaggctaaaagatgtcatgcttgcatttgtatgttttaagcacagccggcaatccaggaaaaaaacgtccctgaaatccgatgagcagccagtcataccgtggcaaaaatgggagcggcacgatttttgtcagcgccaaagacgcaaaaatcacaacagaaaacaggcaggacagggcctgctcccgggcaaatgagaggagttggatgagcacccgcttcattgcttcattcgcagccttgccgtttttttctgaatatgcttttgaacggttgcctccatggtcactcctcctctgttccccggtattccaaaatatcgccgggctggcattccaacgccttgcatatcgcgtccaaagtggataatcggatcgcctttgctttcccgtttttcaatatcgacagattggccatggtaatgccgacccgctccgaaagttccgtcacactcattttcctttttgccagcatgacatcaatattgatgatgatcgccatattttccacctcagaccgttaaatcattttcattttttatttcaatcgcttcctgcaaaagcctctcaagcacagcggcaaagacggtgatgaccgctgatgcaaaaataataaaaaaacaaatggcgagaatccccggggcatcatctctatccgccatgagataaaaaagcgggctgcctgccaagtacaacaggccgatcgctgcggcacaggatttaatttttttcagagctgttacggaatttgccgaaaaagcagtgtttttgtctatcaaacccaagagtatgaaagcctggtacaatgcaaagtaaaaagggagtgccaccccgtacatcacaagcagcacgagaaattccataaaagcaaaatccggaaccaggcggtctgccagttttccgatttccggtaccacaaaaatgcacaaagcaagtatcgggatgccaatcaaaatgaccgccagccttaaaaagagggttgatccccgtttcataaaaaatacctcactgatgaattgtcgttttgattttagcacatgatttatcgttttacgataaattgttattatatttcgatgtatttttatcccaattcaatatctcatccctttaccggtattcccgcagtacccccggtaaacggcccgccgcttcatcgtgtttgaaaaaaagaaagccggaaaccattggatccggcttaaaagttcccggttttaaccggggcgtttcttttcattactcgtcacaatgatcgcattcatccggaatacccggatctactgtcatgttctgttcatatctttggtaaatatggcgcggaacgtttacaacatgtttcctgtttacctggatgatggggtgcacataagtgatgtttctttcaacataagtgtccttataaacataccgcggttcgcaaaataccgtgttgctggtacgattggattgattgccggtgctgcttacattgccggtatgatcgtaacggtcttcaggctgtacagcgctgtttcctgcattggtattgtccgctctcccatcgtcatgatgatcgtgcatccaagggacgactggtgtctttttccgccgtttttccaaactcttcacctcccattcttttttcaatatattaaatgaaagaaaggaacagattgaaacggacaagtaaccaatggtgcataaaattccgccgccaaaaaacgcacttgacatatcggaataagatgattaagatgaaaaatgttaacaaaaggaggggaaaagttggacattttatacattatcatcaatctggccgtcttcatgatccttttggccggtttgtatgccatgcaaagaaaacatgtttcgttttcaaaacgcgttttctcggcattgggcattggcatcgttttcggcattatcctgcatttcttgtacggcacggcgtcgtatgtgaccaaccatacgatcgactggcttaatattgtcggcagcggttatgtttcgctgttgcagatggtcgtcatgccgcttgtctccatttccattttagcggcgtttacgaggctgaaattaaccaaaaacataggaaaaatcagctttcttgtactcgcttttttacttggcacgactgcgattgccgctgcgctcggaatcgcatccgcgcttctttacgggctggatggcatccacttaacgcagggtgccgctgaagccgcacggaatgcggaattgaaaacaagcgtcgccagcgtaaaagacatgaccattccgcaacaaatcgtttcctttctgccgaataacccgtttgcagatttaaccggcgcacgcccgacttccacaatcgcggtggtgattttctccgccatattggggatggcctatctcggggtaaaacgcaaacaacctgagcaggcggaacattttgcaaaaattattgatactttgtatacgatcgtgatgagggtggttacccttattttaagattaacgccatatggagtgctcgcattgatcaccaaggtcacagcctcaagcgactatggcgcgattgtaaaactggcaaagtttgtgctggcttcttatacagcgattatcgtcatgttcctggttcatttgctgcttatcagcctggcaaaattgagcccggtacgatatgtgcaaaaggcgctgccggcactcacctttgcctttacttcccgttccagtgctggcacgctgccgctcaacattgaaacacaaacaaaacgtttcggcatttcagaagggatcgccaatttttcggcttcctttggcctgtccatcgggcaaaacggttgcgccggcatttatccggcaatgctggccattatggttgccccttctgccggcatcaacccggcaagcccgtctttcattattacgctgatccttgttgtagttgtcagctcattcggcgttgcgggtgtcggcgggggcgcactttcgcatccctgattgtcttgtcagtgctcaacctgccgattgcgattgtcggccttctgatctctgttgaaccgctgattgacatgggccggacggcattaaatgtcagcggcgccatgacttccggtattttaaccggcaaaatcaccggagaaatggacaaaaaaatatatcaacaggaagatgccgatcttcttgaagcataatagaaaaaagccctgtgttaacggggcttttttctattatgcaaccggctgccgtaaaagaaaccgaaaatccgttaaaaagaaacggctaaaccaaaccaaacgatcatgacgatctgtatgaatgctttggcgatactgctgttaagaaacccaatgatcgtggcaacgcccacttttacagcctggacgggatttttcgtcatcaggatctccgttatacatacacaaacaaacggaacaaggataattccaaaaggcggaatgacaaaagagccaacaatcgttgcaaccgcagcaaccctttcagatattttggacccgccgtatttttttacaaaatatccgtttgcaatgatatccgccgcaataaggacaatgcttaagatgaccatgctgatccaaaaccagacagacaatgcatgcggattaatgaaaaactgatagactgcaaatccggcccacagcatcacaatagatggaatgacaggatagatgatgcctgcaaaacttaagatgaataaaatcacaatggccgtccaaaggataaacgtcaatcagatccctcctctgctcccggcatgtgccgggactgcatgaaaaccgtgatcatatgaaggccaaaacagtcattccactttaacttcctttccccgccccatataccatttgtaaaacatccaggcaaattcggtggggacatcctttaccccgttaaattgaatcggttttgcacgattcatcgtttcaatggaggcaaggcccagccatttttgaaaaaagttccgggaaacgcgcacttcaatcactttttcccgcttggaaaggaacaaagaagtcgtaaaaatgcccgattgtaactgaataaaacggtcattcaatacatatttcgtatgtaaataaccgatccatcttgcgaccagtatcgatacgaacagaaaagaggacaaaagccaccacggaacacgcaagccgaaaatttctggcttccaaaaatataacacgactgtggcgatgatccaaatccagctcggggcaagcagccggacccataaagatttcttgggaagctgcctcatcttctgtgccacttcatagtccggcaatatctcgtttatgatttcgtacgcccttttaaccggcaaaaaaggatacagcgagtttaattcaagtttctccccttcaaagtcaagccttcctgcactcgtcagctttacttccgccagcccgagcagccgtttcaacaaagactgttccacttcaacagcctgcactttatgcttttcgataaaaaaagacgtttcttcaattacccctttggtaatataaatccgctcatcatcagaggagatttcatatttcccatacttcaaaaaggtccgtgccatgccgaaaatcaccgcaataagggccacaaaaagaacaatacccgatacaatccaccaggaactgattatataagagagcatccctctcgcctttttatcaatatcaacaatatcgtccacattcgaataaaaagaaaaaaatacagggatgacggcaagcgggcttaaagatgtaaaacttgcttttaacgtatcttttctcgtcggtttaaaatggaccacccgttccttttccttttcttccgcatccggttcaaacgttttacgcttatcattctgtacgatgtcaatgattctttccgcttctttccgggtaatcacttcaaataacacggccgcttcatccccggagataccggtttcaaagctgacagaggtgacatgaaaaatccggtgaaaaaaggatgtatggcggttaatgttttggattttcgaaaaaggaatcgttcgttctgttttgttgaatatgcctctatacagatgaaaggcgctttcatccagtgcatatttatgtgtgtaccatttcaaaaaatgatataccatcacgattgcaaaaaagagcaaaaacaaatatctgccatatgtaagcacgggagaacgggaaccggcatttacgataaataagataatgaaaaggatgaaatagctttttacaaaatcaccgatacgaaacaagatcaaaaggggatggtaccgttttttcttcacgattccacctccctgatttttgcataacgcgcaattcggtttcttaacgcaatggcctcctctttaggcagagccggaatggtatgggacgtccccatggtgtccacagtcacggaacagagcctgtatttctttaaaatggggccttgttcggttgcaaccgattggattttggtcatcggaaccaaagaatgtttttcgttcagcacacccaatttcatttgtaaaaattcttcgttcacatcgtaacgccaatttttatagcgaaaatacgaacttatccatgaccagatcatactgcctatatccaacacgagtaaaccgtataatatccagccgatccatgccggccaggcaaagcgatggtcgagataaagcaacacggcgagaaccacaacccctgctccggcctccagcgtctcacgtatgatccaaacctttattgcatctttggataatgtttgtcgaggttcatttatatctgaatacattccatcacctttaaacatgttttcttcatttcacttcataccggcaagacaaaaattcgtattgctcataccggatcaaagatcattttccagttgatccgccatcagttttatgatttcatcctgtgacatttcatttgttaacatggtttcccctttcaccccgagttcgtctctcggattccaccaggcgcgcaaagcttcttctccaaattccgtttttttcaaacgcatattatggcgtctgactgtttcccaaaacgttaagcgaaaataataaatatacgcctttggatggtagaatttcattaaacgggacaacatttccccgtaacggtttttgtttaaaatgccttcgacaatcacaaatctgcattttcctttgccatattccgcaatttggcgaatgagctcaacagagaggtttccttctttgtccggcacctttaacatttcacgccggacggtatcttgtgaaacaagaagcgttccagaacctaaatggctttgaagccttttggcgatcgttgtttttccgcttccggagtttccccttatgataatcagctttgtttccaatatagcaccctcccccggattaacccccgaagaataagtccagaacattagcggcggtagaggtttgtttatgatagaactccgaataaccgcagtttttgcaatacacgacaatgaacgtgttgttctggacatcaaataattttgacagacctgttcccgtcattgccacttcttttttccccgcatgcttagacccgcacttcacgcaccctttttcaggcatggcgatttcccctcctcatcattgttacttttttatacgggcggcagcagaaaaagtttcaggcatttcaactgcataaggggcagcggggatttctgatccgccaaaacggctgaaaacccggaacgatgggtttcttttctgcgggagccgtttcaacggctgaatcatatgccggtgcgggtgccgcggcagatggaaagagccgggtgtattggcctacggggctttcctgccgtttggcacagccgcgcatctattgcgatgaaaaagatataaaaaccgggctgtttttgtatcgggggtattcagggggaatgctataccgtttccccctccatctgttttgtttcaaagtgatcaagcaaggtgcgcacttcatctgttgaatctgtgctcattagttggtttcgcaactcgctcgctccccggaagcctttgacatagatcttaaaaaagcggcgaagcggtggaaacgggcgcggctccagttctgttgaatatttgtcaaagagatccagatgcagtcttaaaagatcaagcaattccttgctgctgtgctctttcggctctttttcaaaagcaaacggatttttaaaaatgccgcgcccgatcataatcccgtcgacaccgtactggcgggctaatctaaggccggtttgacggtcagggatatccccattaatggtcaaaagggtatccggcgccacctcatcacgcagttttttgatctccggaatgagttcccagtgggcgtccactttgctcatttcctttcttgtacgcaaatggatggaaaggttcacgatgtcctgtttcaatatgtgcgtaagccagtcccgccattcatccacatacgtgtaaccaagcctcgtctttacactcacaggcagtccgcctgcttttgcggcttgtatgagttcagcagcaacatccggacggcggatcaggccgcttcccttcccctttgttgctacattcggcacagggcagcccatattgatatccacaccgctgaacccgagtttttccatgcccatgctcatttgtcggaaatattcgggcttgtccccccatatatgggccacaatcggctgctcatccgccgtaaacgccaagcggccgcgcacactttggttcccctcgggatggcaataactttccgtgttcgtaaactctgtaaaaaacacatccggcctgcccgctttacttacaacatggcgaaaaacaacgtccgtcacatcttccatgggtgccagtataaaaaatggccgtggtaaatcgcgccaaaaattttctttcataataaaaatcataacctcccctgtctggtaccgggccaaacgtccaacacaaaaaattttaacctcttttacacttataacatggctcggtcctttttatcaaacgggatattattttgaatgttgtcaaatcaaagcgggcgatcgtgaacgccacacctggggatggaaaaaaccatgccgttttacagcaacgccgccttaaaccaatgattgaacaatataaaccgccatcccccacatgatgactgcagaaactttgtttatgaagcgtaaaaatctccctgactggcctaatctcccaatccctcttcccgcaatcgccaatcctgtgaaccagatccacgaaacaagcatacaggcaatggagaaagccgctttttccgcccctacatagtttaaggaacttgttccaattaccccgatggtatccaatatcgcatgaggattcaataaggaaaccgatgcggcaaaaaggatttgttttttcgcattgaataagccgtctccattttgaactgccggtttgctcctccatgtcgcaatgcccatataaactagaaagcaaatccccgcggacataaatactacttttagccaaacaaattccaatacaacaacagaaacaccaaaaacagccaaagcaattaaaaccatatcgcaaacagaggcggtaataatggcaggcaatgctttcaaaaaggaaggctggacggccccctggttaaagacaaatacattttgcaccccgagcggcaagataagccccaaagctaaaataaacccgtgaacaaacgctgctgacacgatgatctctccctgttttttcttattacctgaatccgtgacgaattgtgaaggcaggatacgtatgcccttttttggagaaaaaaatgcccattttatttctgctgaatttgaaaacctggaagaaaagaaaaaaacaggatcattaattctctagagcctcgttcaagggtaattttttattttggcagaggctcttaatataaagcgccataaagcgcccagccatgcaggaaaagcggcagcatgaacaaaaagtgtatgtcggctttttccttttttgccggggcgggcgtgaaaaatagcatggcctactttgcgcactgcagccgttcgcgtgtgaaaagttgcctgctttccaatttgccatcctccaaggtgttgcgccgaaaaagcgggcatggcctgcttccggcaataccgtttttcaggaagattgtgcataaattggaatacctgattttatccatatgccatcttttatggacattgcgcgggaaagtttcaagaagcggtttgttcctgtgccatccattcctttctgtataccgtttattcctttttaaagcattctcgttccgaaaatgagttccctccttattttcgtactataatttgaactgtagaaaaggacagaagaaacggagggaatcggacatgttagaacgaaaagcaaaccgcagcctgattgtattagggacgatgattgtacaaatggggcttgggactgtttatacatggagtttatttaaccagccgcttgttgataaattcgggtggcaattgagtgcagtatcgacgacattttctattttaagcctggcacttgcagtatcgacattgtttgcgacaaaattgcaggcaagatgggggctgcgccgcctggttgctttttccggcattttgcttggcgcaggattaatcttgagttcatttgcaccttcactttggatgctctatctgttggcaggccttattgtcggttatgcagacgggacagcttatatcacgactttatccaatttaatgaaatggtttccggataaaaaaggcctcgtttcaggcatctccgtcggggcatacgggaccggcagcctagtatttaagtttgtaaacggtgccatcctcagttcgtttggtgtcacacaggcttttctttgctggggagtgattgcaattgccatgatcaccggcggatctttcctcttgaaagaagcagaaaatacaaccacatccggtactgtgtccaaacagccggccggaaaagattttaccatcaaagaaatgctcaaaacgaaacaagcttacctcttattcatcgtgttcttcacggcgtgtatgagcggtttatatctgatcggccttgttaaagacatcggcacgaggcttgtcgggctggatgttgcgacggccagcaatgcagtggcgctgattgccgtctttaacaccatcgggcggctcgttctcggcggtttatcagaccatgtgggaagaatgaaagtggtatcagggacgctgctcgcgacggccgttgcggtttccattttgagctatgcccacttaaatttcgccctgttctttatctgtgttgctgcgattgctttcggtttcggcggaaatgtcaccgtatttccggctattatttcagacttcttcggcctgaaaaatcaaagcgccaattattcagtgatttaccaaggcttcggcatcggcgcattatccggatcggtcatcgcttcccttctcgggggctttatgccgacattccatgcgatcacgattctctgcctggtctcttttgcgattacgcttttcattaaatcgccggctgaagaagcagcccacgcacacggggttcgggggaatgtcaaccgtgcccagcattcgcattaaagcaagggctgtgtgcttcgatcatgaacaagcagacaggaaagggattcgtgcctccatcatgataaaaaacccgctggctgccccagcgggttttcccggtttatccccaaatttcctttgcggtatccacaatatattttactttgtcccactgctgctcttctgttaaaagattgccgtggtgggtggaggagaagccgcactgggtgctgatgcaaagctgttcgagcggtacatacctggatgcttcccgaatccggtttttgatcagcactttatcttcaagctctccctttttcgatgtaaaaataccaagcacgactttcggcccgccttccggaatgtatttcaacggttcaaacccgccggaacgctcatcgtcgtattcaaggaaaaacccgtctactttttcatttgcaaagattttcggggcaattttatcatacggaccttcaaaagcccatttcgactggtagttgccgcggcacagatgggttgtgatggtcagatcatccggcttgtcttccagtacgctgtttgctacatgtaaagcgagatcaatcaatctttccctttcgagctcactgtctgcaaacggcagtttcggtgcacacaggccggcaagataaacatcatccagctgcaagtagcggcagccggcatcataaaaagctttgatcgcatcccggtaagtttggataatatcatttgcgtattcttcaagatccgggtaaatgtcttcattgcggattccggcattgaaaaactgattcgggcttggaatagtcattttcgcaaccgccctgtccccggcgatttctttcagcgcaataaaatcttttatgtgcggatggtccgggttaaaggagacttttccggttacccggacgtcataagcttccgtttcgatgccgacaaaccggtatccatggttcggcacgtacccttttaccccgtttaaatgttccatgaaatccgtatgccagaatctccgccggaattctccgtccgttaccgcttcgaggccggcttcaatttgtttgccgaccaggcggcggatttcttcattttcaattgcacgcaagtcttcggccgggatggttcccgctgcaaatttttcccgcgcttcgtgcaaccgggccgggcgcaaaaagcttccgacaatgtctgccctgtacggcgcttttgttaatgttttcgtcatcatgattccctctttctggatattttttaaaacagctgctgtgcgcagaaaaaaattgcttttagctgcatgggcccattaaaaaacctcttctgcaataagaagaggtttggattgcaaaactgaaccgtccgctcttcttatcttcaagcaatgctttctggaattggcacagttctttaaaaaagaccgctgccgaggcttcaaggggccagtccctccacctctctggataagaattttaaatattatttagtttaaatacactttaaatgttccacctatttttgtcaagggcattcgcaaaattttttaaaatgggacgggaagattgaaatcaggggcgatgtgaaaatataatagtaataagaaaaacaaaggagggattttatggaggccatacaatcaaggtctgtattccagaaagtgcttggcgtctttgccgtttcactgctgtttgcaacggcgggtttatatacggggagattcattccgcctgcgcttatgatgccgctgatggttgcagaaattgcaatggtcatcgccgctttctggttaagaaggaaaaagagcgttgggtatttgttcgtttatgctttcacctttatttccggtattacgacatatccgattgtagcttattatgcatcccaggccggtgctgaggtcgtcctgctcgcttttggttccacgttcggcatttttgccgtgatgggcgttattggggccgttaccaagagggatcttggctttttaagcaccgcattgcttgtcgcattgttggcgctgatcttcatcggaatattcagcattttcagcccgttaacctcaaccgggatgctcgcgtactccttcattggcgcgattgttttttccctgtatgttgtttttgactttaaccaaatgaagcaccatggcatttccgaggaaatggtcccgcttttggctttaagcctgtaccttgattttatcaacctgtttatttacattttgcaaattctcggcattttgggaagagacgattgagaaaaaagaaaacgcccgccattcaccggcaggcgttttctttttcacatgttggatgtcaaacaaaacaatacggtctttttgctcccattcggggatgcgcgcttcccatgctgcccggaccatttgtgccaaatgctgctgcgcatccggccccatcagcgataaaaacagcgctttccggtggagatgcttttttccatcgagcgtctggatcgtattttcgccaaacaacgttttttgaatacgtttcggcccagccccgtttcgtttgaatttttccgggtcataaaacattttgactgcttcctcgccgctgatgcacaccgctttttgcccgagcagacgggtttcaaacaagattgcatgataatcgtccgtccggtttttaatgtagagatacccttatttcatcaaatcaatggtatcatcaatcgttttttcattaggaatttgcccagccattgctctgctccttttttcatgtgcccgttttccccggctgcttccggaaaaaacagggcacatcctttttttatcttcttgcactttttcatcttcattcaaacattgcacgcaacataatcgaagtttacccgcaagatcgaagtttacccgcaagccggcgaaattatgccatgtttcggttcacatccaaacagggtataaggaaatagaaatacaaaaggagagggaagaaaatggcaaaggaaatcaatgtgggcatcggatttgcaacaggaagaaaaagttttaaaaatgttttaaaaacgtatatgtataacttgaaggaatccgaactgacggagagcgacaggatcaagctgcatttgtttgttgcctatgatttgcactacgaaaatgcagagcctgaagactttgtacatattgaaacggaatgcatggaagatattgaccgggcttatttcatcggggagaaggagacgcgtaaagcaaccgaagaactcgtatcccaaatgggcatgagcagaaaagaagcagtccttttgttcggcgaaggatacgcgtccaaacgcaatatcatcgtttatgaggcgttgaaaagaggcatcgattatctcatttttcttgatgatgacgagtatccggttgccgtgacaaaaagcaggaaaacggctgtctgggggggccagcaagtgctccggaagcatttggaacatatccggaatgccgatattacgaacggataccattgcggctacatttccccgattccgttcatttctttcaatgacgtcctgcaagaaaaagatttccgcacgctcattgaggccttgagcaacgatattgtcaattgggatacgatcaaaaccgtgatgaaaaacggcggggtgacatatgccgatacaggtgtgcttgtaaaggatgaagcggaagaagtgccggagatcaaccgtgcaaaatttatttcaggatcgaatttgacgctgaatttaacagatccggaccgtgtgctgccgttttacaatccgccgaatgcacggggcgaggatactttcttaggcacatgcctggcagaccggactgtgctgcgcgttccggcctatactttccatgacggattcggcgcttaccagcatttgctgctcggggtgctgccgaccaatttaagctatattaaagcggatacgaaacaggtcgtggagcgtttttacaaagcatgtgtcggctggatccggtacaagccgctttatgtatatatcaccgacagggaaaactatgaagaaaaaatggcggaagtgcgtgcccggctgaaagagacgcttccgaaagtttgccgctacttcggacgggatgactttatgaatgtactggaggaattcgagcagtaccaccgcaacgtcagacagcattaccgcgattttcaggatacaaaagcagcctggaggaaaatgaccgcgcaattggtttcaagagaaaaaagggaaacagccatttaagccgctttggatggagcggctttttgccggttggaaaggaaaaacctggccggatggggaaagtcataggggagacccctttcgcgcatagccgcccatcccacaacgctggtgcaaattgtccacggccgctttttgcacggccggagacccgggtgaaaataatggccccttatgcatgatattgccgctctgttgcctgctgcaaaaagtcatcctcatgcaaattggcgcctggtcctggggaggaatttaagttcatttatatagcatcatgttaatttatttggtgtatggggtataagaatggtgttcttttagaggcggggccatctttccctgtcctggctgatcttcggacaggccgcaaaaacgcgggcggccgccgcttcaacagccatccttttatcataatagatgaggtgtggaataatgagatcgattgtaaatgaacaagaagaaattatcacataccttaagaaaaatagaaacagcttcgaacagaagttattaaatgaggccgtaaatgtaaaaaataaaattgatgaaattttaagaatagggaacattgatttgttgaataatgcctttaaaattgtgacgtatgtcgtcgaacagcaggatgaggaattggtcacttttgcccgccaggaagggattgcctgggcaacgcattctttgacgctcggactgaaactggagtgggtgcaggcgatccgccggacattatgggtatttctgagaaagtacggggaagaaaaagggattgaagtggaccaggactacttttttaacatggagaaaaaaatcaatgaccgtattgaccaatttttaaatcacttttttatccggtattctacctataaagatgaactgatcgaccagcaaaaaagattggtggaaaacctgtccgtcccgatcattccgattacatcgagcgtctgtattttgccgttaatcggctctattgatatgttccgcaccaatattttggaagaaaaagttttgcttgaggtagggcggctgcatgtccaaacgttgataatggatttctccggcattgcagaagtagagatggaggtagtcgaccatatttttaagatgattgacggcacttcgatgatgggatgcaaagtggtcatcaccggcctgcgcccggaaattgtaaggcagatggtcacaaggggcctttcctttgaaaataaagcagaaacaaaagggacattacagcaggcattgaaaaaatatattcaatatgatgatttaagcaaggaaattacgctgtattaacggttatattatagaaatcataaaaaaggccccgcacttttccaggaggcggggcctttttttgcggctgaaaacgtaaagcgtttatgattcgattacaggctttgcgccgggcgaaaaatttgcccgcaattccccatactttcctcccgggggaattgcggtccgatccgtgggaaaagcgagaccaggctggccgcctcgaagcttttccgggccgctacaaactttgttcccttgcctggacggcacgtgtttcttttgtgtggtgttccagccggctgaataaaagcccgatggccgttccgcaaagagccggcattacccattcaaggccggcggcggcaagcggcagtttttgggcgaatgccccgataaagccaagcgggacgccgaaccctttcagcccttcgattaaagcaaacacgcccgtaaacaacaatgcaaagccgtatacttttttcgaaccgcggaatgccgcgtggaaaaatgtcaggacaacgagcacgatcgtaaccggataagccatttccaaaaacgggacggaaaattttaaaatggtattaagcccgagattggagagcgtaaagccggtaagggcaacggcaatgataacgccatggtagctgaatttcggcaccagattggaaaaatattgcccgcacgctgttgttaaaccggcgacggttgtaaagcaggccagcataaaaataaaaccgagcagcatttttccggcctgcccgaatagcagggaagacattgccgtcaggacatcggtgccgttttggaacgtgccgcttgcagccatttttgcgccgatcaatccgagtgcgacatagacgagcgccaaaatcgcgccggcaatcaacccggcttttaatgtataggccgtcatttgtttccggtttgcgacgccgcggtgtttgaccgctgttaaaatgacgatgccaaacgccagggaagcgagcgcatccatcgtggagtatccgtcaataaagcctttatagaaagaaccggtctggtatccggctgccggtgccgtaaacgggcggccagaaagtttaaagaagccggctgtgcaaaggacagccattgccagcaataataccggtgtaatccagcgcccgagcgtatttgacattttgtcaggattcaggctggtcaaatagacgagcaggaaaaagacggcgctaaacaacagcaaagagactggcgaactgtgggcggacccggaaagaaacggtttaacccccatttcataagcgacgtttgcatttcttgggatcgccaaaaacggcccgatacataaatagacaatcacggtaaatactgtactgaaaaccggatggacccggtttccgatcgcctggatgccgccatctacaaaagagactgccgcgataacgagaaccggcagcccgacccccgttacgataaagcctgccattgccggccagtaagacgatcccgactggatgccgagaaaaggagggaaaattaaatttccggctccgaagaacatggaaaacaacataaagccgataaacaatacttcgtttcttttcataactatgtccgcttcctttcgatgcaatatagagaaaaacaaaaaacccgcccctgaaacagggacgagtttgctcgcgttaccacccttattccgcacaaaagcgtgcggcacctcatacaacgtaccaacatacgtgttcctttcttaacgggggaatcgccgtcaaagcctactgtaaacttcagctttgcatctcggggatgatcttcggaatggccttgaacattggctttcagcaatatgccaactctctggggaacaagatccaaacttactcttcccgtcctcgacttttgtttttttatattatttgaaaataagattatcactgaacatttcatctgtcaacatctctcccagaaaattttttagccccgtccctgccatcaaaaaggacagaagtcgcaaaaatcaattgctgaaatgggataagaaagaacagaagccaaaagccggcccaatacaagagctatctgaaaaagcggcaagcagatgaaacgaaagaagtcaggggccaaccccgagcaattcaaaaaatgaaaaaggaaaaagtcgatgaaatcaataatgaaagcgtttccaaatagattttcaaatcaaaattgtcaaaaaagtttacagaaaagggttgacctcggcggccaaaagtcgtatgattgacaacaattaaagaatataaaaaattctctcgggcggatatttaaaaatccggattttcaccgggcacaagaaaaaccccgcaggcaatagaatgggagtgatggaatgcgaagtgacatgatcaaaaaagggatcgaccgtgccccgcaccgaagccttttatatgcagcagggctgaaaacggaagatttcgataagcctttcatcggggtgtgcaattcctatattgatattatcccggggcacaaacacctcaataagtttgcggaagtggtaaaagaagccatcagggaagcgggcggtgtcccgtttgaatttaatacgatcggggtggatgacggcattgcgatggggcatatcggcatgcggtattcgcttccgagccgcgaattgattgccgacagtgccgaaacggtcatcaacgcccactggtttgacggggtcttttacattccaaactgtgacaagatcacccctggcatgctgatggcagccgtgaggacaaatgtgccggcggtctttgtttccggggggccgatggaagccggtatggcgccggatggaaaacagttgtcccttacatcggtatttgaaggcgtcggtgcccataaatccggaaaaatcagttatgaagagctgaaaatgctggaaacgagcgcttgcccgacatgcggatcgtgttcaggcatgtttacggcaaactcgatgaattcattaatggaaatgcttggcctgacgccgcccggcaacgccaccatcgttgccacgtcggaggaacggcaccgcattatccgggaagccgtcggtcatttaatgaactgtatcaaaaatgatatccggccgcgcgatattgtcacagaagaagcgattgatgatgctttcgcgcttgatatggcgatgggcggttcaaccaataccgtgctgcatacgctggcaattgcccgggaagcgggaattgactacgatttggaacggattaacaaggtggcggaaagagtcccgtatcttgcaaaaattatgccggcgtcggattactcgatgcacgacgtccaccttgcaggcggaatcagcgcaattgtccatgaactttgcaagattaagggggcgattcaccccggccggctgacgatcaccggcaaaagcatctatgaaaatgtgaaaaatgcggaaatccgcaatcctgaagtgatcaggccgaaagaaaatccttacagcccggtcggcggtttgtccatcctgtatggcaacattgccccggacggtgccgtgatcaaagtgggagcggtcgatccggatattcacacctttaccggggaggccattgtattcgagtcccaggaagaggctcaaaaagggattgacagcggccttgtccgtgaagggcatgtcgtcgtgatccgttatgaagggccaaaaggcgggccgggcatgccggaaatgctcgcgccaacatcctccattatgggccgggggcttggcaaaaccgttgccttgattacggacggcagattttccggcgcaacccgcggcatctgcgtcggccatatttcaccggaagcggcggaaggcgggccgatcgcacttgttgaaaacggcgaccgcattacgattgatttaatcaacagaaggattgagctccatgttccgaatgaagaattgcaaagaagaaaacaaaattgggtgcagccggagccgaaaatcacaagcggttacctggcaagatattccgcactcgtgacttccgcgaatacaggcggggttttaaaaatcggattaccgcaaaaaacgttgacggggacaaagtgatcggatcaggtattttttagagagccggggatgctgggagcccggtaaataccccggtcacgacatcgcctctgagtgcaagtctgaacggttctgcctactaggacttgccgggtcggccgcatgaagcggaggacccgttaccaaaagcagcattttgtaaacgatgctgcatgaggcggcgtttgtgagaacgctgtgaagttgggtggtaccatgaaaagatgccttttcatccctgcaaaaccggtaaaaacgattattccttttgccgttttcaaggagagaaaggcgttttttattgggataaatcaaggagcctgcgcaaatcagaataggaggttaaatcgtgtgtgcgaaagcaagaatggatggcaatgtgaaaacagcagaatgtacgggtgctgaggcgcttgtccagttattggtgcgggaaggagtcgaagtcatgttcggctatccggggggtgcggttttaccgatttacgatgccctatacaaccagccggtcaggcatatcctggcccggcatgagcagggggccattcacgcggcagaaggttacgcgcgcgttagcggaaaaccaggtgtcgtcattgcgacttcgggcccgggggcaaccaacctgatcaccgggattgccgatgcgatgatggactcgctcccgctcgtcgtctttaccggccaggtcggcacttccgtcatcggctcggacgcgttccaggaagccgatgttatcggcatgacggccccgattaccaagcacaattaccaggtaagggatttgcgggatttgccgcgggtcgtcaaagaagcttttcatattgcaaaatccggccggcccggaccggtggtggtcgatatcccgaaagatatccagcagggcacggtggaaatgggagaaaaccgggaagtatatctccccggttaccagccgaatacaagcccgaatccgctccagattaaaaagcttgtggaagctgtctcttattctgcaaaaccggtcatattggcaggagccggcatcctccatgcaaaggcgtctgatcttttgctcaagttcgcggaaaagtgccacatcccggtcgtaaacacgctgctcggccttggcagttttccgttcagccacccgctttttctcggcatgggcggcatgcatggaacgtatgcggcaaacatggccatttgcgagtgcgatctgctcattaatatcggggcccggttcgatgaccgactgacaggcaacttagcccactttgccccgaatgcaatggttgtccatattgatatcgacccggctgaaatcggcaaaaatgtcaaaaccgatatcccgatcgtggcagatgcaaaggaagccttgcagaagatttgttcggaagatttgcaaaacgccggcacggatgagtgggtccgccatgtaaaagcatacgccgaaaattttccgctttggtacgaagatgacggcgagggattgtccccgcagcatgttattcgaagaatccatcattacacaaacggagatgcgatcatttcgacggatgtcggccagcatcagatgtgggcggcgcagtattacgggtttgaaaagccgcacaagtggattacatccggcgggctcggcacgatgggattcggatttccggccgcaatcggcgcgcaaatcgcatgtccggaccaactggtggtttcgatcagcggcgacggcggcttccagatgacattacaggaacttgccgttgtaaaagaattaaatctgccgctcaagatattcattgtgaataaccagtatctcggcatggtacggcagtggcaggaatctttctacgaagaacgctattcctattcgacgatcccggtgcagcccgattttgtcaaacttgcggaaagctacggcatcaaaggctgccgcgcaacgaacaacgaagaactcgaacaggtgctgaaatccgttttcgaggatgacgggcctgccgttgtcgactgccgcgtgaaaaggcttggagcggtgttcccgatggtcgcgccgggtgcaggcttgcatgaaatgatgggggtgaagccatgaagcggattgttgtagccactgttttaaaccagagcggggtgctgaacaaaattaccggcgttctcgcaaagcggcagtttaatattgacagcattacggtcggccgcaccgaaacggagggcatctcgcgcatgaccattgtcgtcaatgtcgaagacgacagacaggcagagcagctgacaaaacagctgaacaagctgatcgatgtgatcaaagtccaggacatcacaggccaggccatcgtctcacgggaacttgctttgattaaagtattgagcacaccgcagacgagaagcgaaatcggcgggcttgtcgaaccgttccgtgcctccatcatagatgtcagcagggaatctgtcaccatccaggtaaccggcgacagcgacaaggtggaggcgctcgttgacctgcttaaaccgtacggcatcaaagaaatggtccgtaccgggatgaccgcatttctgcgcggctcgcaaaaacaagtaaccgatttaagctcgtattccctattaaaataaaaatcttgaacttaaggagagaatgaaaaatggcaaaagtttatcttgaaaaagacatcaaagaagaagcattgagagggaaaaaaatcgccgttgtcggctatggctcccagggccatgcccatgcacaaaaccttcgtgataacggttttgacgttgttgtcggtgtcaggccgggccggtcgtttaaccgtgcggaacaggacggattttccgttaagcctgtgaaggaagccgcaaaagaagcggatgtcatcatgatgcttctgccggatgagcagcaaacaaaagtatacaaagaagaagtggaagcagggctcgaacccggcaatgcaatcgcatttgcccacggattcaacatccattttacccagattgtcccgccggaaaatgttgacgtctttatggttgcgccaaaaggcccggggcatctcgtcagaaggacatttgaagaaggggccggggtgcctgcgcttgttgccgtccaccaggatgtgacgggggaagcaaaagacctggcgtttgcttatgcaaaaggaatcggggctgcccgggccggcgttttggaaacaacctttaaggaagaaaccgaaacggatttgttcggtgagcaggctgtcctgtgcggcgggttgacctccttaatcaaagccggttttgaaacgttaacggaagcagggtaccagccggaactcgcttactttgaagtgtgtcatgagatgaagctgatcgtcgatttgatctatgaaggaggcctgaaaaatatgcgctattccatctctgatacggcgcaatggggcgatttcgtttccggcccgcgcgttgtgaatgaagatacgaaaaagcgcatgaaagaggttttaaaagatatccaaaacggcacatttgccaaaggatggctgcttgaaaaccagacaaaccgcccgatgttcaatgccatcaacacacgcgagcaaaatcatccgctcgaaaaagtcggtgaagaactgcgcgatttaatgccttttgtcaaaaatccgattaaacaaaaggaagtggctgtgaatgcaaaaggttaatgtttttgacacgacgttaagggacggggaacaatcggcaggcgtcaacctcaacaccgtggaaaaagtcgaaattgccaaacagctggaaaaatttggcgttgatatcatggaggcggggtttcctgcctcttcaaaaggggattttgaagcggttgaaaaaatcgcaaaaaccatccggaacagttccgttaccggcctggcgagggcatacaagcaggatattgatgtagcctgggatgcactgaagcattccgccgagccaaggatccatatttttctggccacatcgccgatccatatgcaatacaaactgcgaaaaacgccagatgaagtggcagctatcgctgttgaggctgtgaaatatgcgaagcaaaaattcccgctggtgcaatggtcggcagaagatgcgacaaggtcggataaagactttctcgtccggatcattacagaagtgatcaatgccggcgcaaatgttatcaacctgccggacaccgtcggttatacgacgccgaaagaatatggtgcaatgtatgactatatacgggagcacgttccgaatattgataaagtcattttatccgcccactgccatgacgatctcgggatggcgacggccaatacgctttcagccattgaacacggtgtcctccaagtggaagggacgatcaacggtatcggcgaacgggccggcaatgttgccctcgaagaagtggcggtcgcccttcacatcaggcaggattattacaacaagaaaacccgcttgaaattggatgaaatcaaacgcacaagccaattggtcagcaaactgaccgggatggttgtaccaggcaataaagcggttgtcggcgcgaatgcttttgcccacgaatccggcatccaccaggacggcgtgttaaaagaggcttcgacatatgaaatcatcactccggaactggttggattctcaagcaaccggcttgtgctcggaaaacattccggccgccacgcttttaaagaacgggcggcagcgctcggctttgatcttggccaggaaaaactgaacgaagcgtttaaagctttcaaagcattgacggataagaaaaaagaagtgaccgatgacgatttgttcgccattttagccgaaaagcaaaccgatgcggcagatgctgcgcattatgaactggaaagtgtgcaggtgcagtatggcacattgaatattccgaccgccacagtaagaatcaaaacaccggagggaacgcttgttgaagaagccggcaccggatcggggagtgttgaggcgatttaccatacgatcaccaagttgtttgacggtccgattgagttgaaagattataaactgcagtcagtcggttccgggcaggatgcgcttgcggatgcttttgtcaaagtgaaatgcggggagtttgaatgcggcgggcgcgggtctgcccaagacgtactggaagcttccgcaaaatcatttttaaatgcaatcaacagggcgcacgcaatggaacagcaatcgagaaaacaagtacaggtgtgattttcggggaggaacgacaatgaaaatgaaactggccgtactgcccggcgatgggatcgggccggaagtgatggatgcagcgatccgcgttttaaaaacagtgttggacaatgacgggcatgaagccgtttttgaaaatgcgctgattgggggcgccgccattgatgaagcggggacgcccctaccggaagaaacgcttgacatttgccgcaggagcgatgccattttgctcggcgcggtaggggggccgaaatgggatcataacccggcttccctccgcccggaaaaaggcctgctcgggctccggaaagaaatggggctgtttgcgaacctgcgcccggttaaagcatatgccacacttttaaacgcatcgcctttaaaacgggaacgtgtggaaaacgtcgatcttgttattgtccgcgaactgacgggcggcctctattttgggcgcccgagtgaaaggcgcgggccgggcgagaatgaagtggtagacacgcttgcctatacaagggaagagattgaaagaattattgagaaagcattccagcttgcccaaatcagaagaaaaaaactggcatccgtcgataaggcgaatgtgctggaatcaagcagaatgtggcgcgaaattgcggaagaaaccgcgaaaaagtatccggacgtggaattgagccatatgcttgtcgactcaacttcgatgcagctgattgcaaatccgggccaatttgatgtcattgtaacagagaatatgttcggcgatattttaagcgatgaagcgtccgtgattaccggcagcctcggcatgttgccatccgcaagcctccgttccgaccggttcggcatgtatgaaccggtccacggctccgcgccggatattgccgggcagggaaaagccaacccgctcgggacagtgctgtcagcggctttgatgctccgttattcgttcgggcttgagaaagaagcggcggccattgaaaaagcagtggatgatgtgcttcaagacggctattgtacaggcgatttgcaggtggcaaacggaaaagtggtcagtacaattgagctcacagaccggctgatcgaaaaattaaataacagcgcagcccgtccgcgcatttttcaataagagggcgtatctttcaataaaaaaggatttggcaagtggcagtttacagcggtgcacgttttctggatggaaaaacagcacggatttttaatcatgaaaaaaggaattggcaaaacggagattgatctccaaaaaacgaaaagcggcagatgggagtgatacgatggcaccgaaaacgattatcgataaaatatgggaaaaccatttggtccaccgcgaagaagggaagccggacctgctctatattgatttgcaccttgtccatgaggtcacgtccccgcaggcgtttgaggggctgcggataaacggccgcaaagtgcggaggccggatctaacctttgccaccgttgatcataatgttgcgacaacaaggggccggatttcaaaagacccggtctcgaaaaaacaaatgtccactttggaaaaaaactgtggggaattcggcatcccgcttgccggcatcaaccatccggaccaggggatcgtccacgtcatcgggccggaactggggctcacccagcccgggaaaacgattgtatgcggcgattcccacacgtccacgcacggtgcatttggcgccattgctttcggaatcggcacgagtgaagtggaacacgtgttggcgacccagacattatggcaaaagcgcccgaaaacgatgcagatcaaaatcaacggcaaactcgggccgggcgtgacggctaaagatttaatccttgccatcattgccaaattcgggattggcgtcggcaccggccatattgtcgaatacaccggcgaagcgatccgcaatttgtcaatggaagagcggatgatcgtctgcaatatgtcgattgaagcaggagccagggcagggttgatcagcccggatgaaacgaccatttcctttttgcgcggaaggaaatatgcgccgaaggaagattttgaagaaaaagcggcatactggctctcgctggcatcagatgaaggcgccgtctatgacaaaacgcttgaaatggatgcagcagaaattgagccgcaggtcacttggggcacgaacccttccatgtgcctcccggtcagtgaaaaactgcctgatccggctgaaatcaacgatcccggcgaacggcaggcggttgaaaaagcgttgcaatacatgggccttgagccggggatgaagattacagacatccctgtccagcatgtatttatcggttcatgcacgaactcgcggcttgccgatttgcgggctgcagcggaaattgtaaagggacggcatgtaagagaaggagtccgggccctcattgttccagggtcgcaaagcgtgaaagcacaggcggaagaagaaggacttgacaaaatatttacggaagccgggtttgaatggcgcgagtcgggctgcagcatgtgccttgcgatgaatgatgatattgtcccggccggagaacgatgcgcttcaacatcgaaccgcaatttcgaaggccggcaggggactggcgccagaacgcatcttgtcagcccggagatggccgcagccgccgccatttacggcaaatttgtcgatgtccggaagctcggccagactgtgccggcccgctaaatggcggcatggcgcgctgcttcttttgcagcaggcagcagaagtaaattcattcatctatacggagagagggggcaaaagcaaatggagccatttcaaactttttcagggctcgtattcccattggaccgaaaaaatgtcgataccgaccagatcattccaaaacagtttttgaaacggattgagcgcaagggattcggggaatgtctgttttacaactggcgcttcgatgaaaacggaaataaaagggaagattttcctttaaatgatccgaaatacgagggagcacagattttagtggcaggcgacaacttcggatgcggctcttcacgggagcacgcgccgtgggccttgcaggattacggctttaaagtggtcatcgcaacaagttttgctgatattttccataataactgtctgaaaaacgggattttaaccgtagagttgccggaagaagaagtgcgcgagttgattggcaaggcacaggcagaacggctcgttttaacggttgatcttgaaaaacaagtggtattaacgggagaaaagtccatccactttgacattgatccgtatccgaagaatatgctgttaaagggactggatgaaatcgggctgacattattgcttgaagatgaaatttcaaaatttgaagcgtctgaaaacgcaggagtgtgacgggaacaatggggatttcttacaaacgaaagacattgtagcagcatttgaaaacttattgccggtcgtgcaccggacgccgttgaacgaatcggcgacattcaatgaaatggcaggaacaaggctttactttaaaatggagaacctgcagcgcaccgggtcttttaaaatcaggggcgcactgaataaaattacgaacctggcaggggatgcgagaaaaaacggcgtgattgcggcatcggcgggcaaccatgcgcagggtgtcgctttttcggcaacgaaacaggggttgaaggcaaaaatatatatgccggaaaaaacgccgcttgccaaagtgttggcaacaaaggcgtatggcgcggaagtcgtgctgaccggcgaatcctttcaggaagcgtatgaagcagctgtgttggaccagcaaatcacaggcgcaacgtttattcacccgtttgacgattatgaagtgatggccggccagggcacgattgccctcgaaatgatccagcaatgcgcggatcttgatacggttgtgattccggtcgggggcggcggtttaattgctggcatggcctgcctcctgaaaaattatgatccgaaaatccgcgtcatcggcgtgcagtccgagggggcgcctgctgtttataaccgctttaaagggatgggaaacagtcggctcgaacatgtttcgggcatcgcggacggcattcttgtaaaagagaccggccagctgacttttccgttaatcagcaagtatgtggatgatgtcgtgacggtgagcgatgaagacattgccattgccatcatttatatgctcgaacgtgaaaaaatgtttgtcgaaggggcaggagcggcggctttcgcggctgtattaagcggcaaagttggcgtttcgggaaagcatattggcattgttgtaagcggcggaaatgctgatctggataaaatctcccacttcaaacggctggctgcggccggcaaaaaaaaacataaggttgtttcgctttagaaccgggcaccagcaggccggggcatgccaggcgtgttcaccaggcttgccccggggcgccttttctttaatgcaggccgaaaagtgaaaaaacgatacaaaaaaacagcatcctttgttacactgatgtaggaaagaggtgaagagatgattcaaacggtattatttgatgtggacggggtattgctgagcgaggaacgttattttgacgcatccggcttgaccgtctgggaattgatacatagcggccattatttagggctcgcaccggaacaatttaaaacagccttaacagatgaggaaatcaggcggatccgggctgatgtttttcagcatgatgaagtgttgcggtttttaaaatcgcgcggcatgaacgccaactgggatatgatttatttgacgttcacctgccagctgttacacttgctttcgcaaataaaggaagaggaagcaggccggatccgcggctggctggcgcgtgaaatcgattatgaaacgcttcatgaaatccgcggggtgcttgcacactatccggttgaaaccgactacggcatatttttaaactggtttgcaaagaggcccgaaacaaaacaggatttgttgaaagtgctggaccagcttgcttatgaaatcttcgggcttacagatacgcagcttggcaaaaaaggcgcgctctggtcggtgtgcgagcagatttcccaggaatggtatgtcggcgaccaaaatattatggcctctaccgggaagccgagcgtgcaaacggggaaaaaaggctttctcgatgaagagatcccgcttgccgaaccggaaaaaatcggtgccttgttttcctttttggcggagaaagggctgaaactcggcgtcggcacggggaggccgcagcttgaaacgtacgggccgttccgggcgcttggctggctgccgctgtttcatgaggcgcatatcgtgacggcggacgacgttttaaaggcggaagaggagcttggaggccatacgccgcttgcaaagccgaatccttttacctacctgcttgctttaaaagggaaaaacacgcccacccgcgactgtgcggaatgcagcctcccgcttgaaaacgggcaggaaatcctgattgtcggggactcgctcgcggacctgcttgctgcaaaaaaaataggcgcccaatttgccggcatcttaaccggcttgtccggaaaagaagcaaaagccgaatttgaagaacacggggcagattatatttttgagaatgtagtaggcctcaaaaacatatttttgtagactgctggggtatgctgaggcatgcctctttttcgcaggatattccgcgccgtaaaaaacggcaatttccgaaaaaatttttttgcagggaaaccttacatgatcactttattaatatagtgtaatttttccagttcctctataaaaacgggatgaaaagtttggaaaaatatttttaaataaaattaaatgttgactttattttaaaattaatgtaatatttcaacatcacaaaagaaggagcagaaatcaaggtggaaacccgtaagaaccttcattttgcggaaatcgttgaagtcctgaaaataaaacagaaacggtgatcttttaattcggagtatttcaaggagtgggaaagatgaaacaagcaactaaagattatgtaattgacagggcatataaagcatcggccggggtagcaaacgctgtgctcgtgactttggggctgggccttttgtttgaaacgttcgggaaattcctcggctgggacggctttttggccatcggggcggcgacgaaatcgctgttggcgccggccatcggcgcagggattgcatatcagcttggcggcaatacattggtcattttcagttcgatggcttgtgcggcggttggcggaaatgcgatcggcaccacccaggacggcttgattacgattgtcaccggacagcctgtaagtgctgtgctggctgcagttgttgcaacgtgggtcgggaagcgcgtgtccggcaaaacgaagctcgatatgatggcaattccgtttgccgccattcttgccggcggtgttgccggcgttggccttgctgctgtcaccacgccgtttttgcaatggctgagcggtgaaattacggcctctgtacaaggttcgccgcttttcggttcaatggttgtatcgctcgtctggagcatcctgctcatgtcacctgcttcttcggccgcgcttgccattgcgttgcagcttgatccggtatccagcgcagctgcactgatcggctgtacggtccagtttgtcggttttacggcaatgtcgctgaaacaaaatgactggggcggcaatattgcacagtccttgattacgccaaaagtccagttcccaaatttggtgaaaaatccgcgccttgtcattccgccgtttgtttcgtcgctcatttgcgcgccggttgcaacgatgatgtttcacttgaaagtgccgtatgaactcggcgggctcggcctgaattcattaattgcgccgcttaatattctcgccaaccagggaaccggcccgctgcttgcttatgttgcggcaggtgtgattttacccatttttacgacgctcggcatctatcatttccttaaattgttcggctgggcaaaagccggcgacctcagaatggaagtccaataataccggaaagtaaagccgggccgtacaagcccggtttttgcctgtatccgaaaaaaaaagcattcacagcgttttgccgtgaatgctttttatttatacttctacaaaaggttcttcctgaaaggtatagccggttgcgagttccaaagtctggacggctttaatgccgatgatctcttttaattggtccagcacttgccggcttgcggttttatcgagcgtgagcaccatgatcgcttccccaccgatttctttccggcccacctgcatcgtgccgatattcgtgtcgttgctgccgagaatcgaaccgacccggccgatcatgcccgggatgtccagatgccggatataaagaaggtgctgttccgggcggagatcgacgcggtaatcgttcagcttcacgatgcggccgccgaacccgttaatgatcgaagcgccgatattcacttgtttgccttttttatacagcgccagttccagataattggaaaagcccttaagcgacgcattgcgctgcagattgtatgtcaagccctgttcctttaagagatgaagggcattgacaagattgacggtgctgccgaggtggcgcgccaggatccctttgatgatcgttcttgtcagcagttttgtatcttcatccaaaagctcgccggcgtacgtaatttcaattttttccggcgcttcatccaaaagctggatgccgagttgtgccacctgttcgccaagaaggaggaacggttccatccgttcgcggttttccccggaagtttgcggcatattgatggcattgcggatttcctcagattcaaagatatggatgatttcgtcgctgacatccgccgccacccggacctgtgcttcgcgggtcgacgcgccgagatgcggggttacaataacattcggcagttccaaaagccccggtgtgatgtccggctcgttttcaaaaacgtccaaggcggcccctgcaacgcggccttcctgaagcgcctgaagcagcgcctgttcgtcaacgagcccgccgcgtgcgcaattgatgatgcggacaccttttttcgtttttgccaaaaatgcttcattgatcaaatgcttcgtttctttcatcagcggcgtatggagcgtgatgaaatcagcccgggcggcaatttcgccaagcgttgcttttttgatgccaagcttggccgcgcgttcttcggttaaatacgggtcgtacccgagcacggccattccgaatgcttttgcccgtttcgccacttctgtcccgattttgcccgttccgattacgccgagcgttttcttgaaaagctcgacgcctttgaacttttcgcgctcccattttcccgcggatgcggacttgtgtgcctgcgggatattgcgggaaagggaaagcatcatggcgagtgtatgctccgttgcggaaatcgtgtttcctcccggcgaattgacgacaataatcccttttctcgtcgcagcatcgacatcaatattgtcaacgccgaccccggcccttgcaatgacgcgcaaattgccggatgcctcaatgatgtcttttgtcacttttgtttggttccgcacaatcagcccgtcatactggccgatcctggcttttaaatcttccggcgcaatgcccggctggtgctcaactaaaaaatctttgtgcgcatacagttttttcaagccttcttcgcttactttatccgttactaaaattttaaacatgcgctttccatgcctcctccgcttttttcactgcaatgccgaatgtatcccttccgttcagttcgtgtaccgccatttccagcgcggttaaaacgttgatcacgtcaaaaggggtgctgtaccccatatggccaatccggaaaatttttcccttcaactgcttttgcccgcttgcgacaaccattgaaaaatgatcctgcaaatattttttgattgccccggcctgttcgccatccggtttcaccgctgtgacggtcggcgaagcatccgcatcgttttcgacaaggagcggaaggcccaaagctttcacgccggcgcgggtcatatcgcgcaaaatttcatggcgcttgatgacattgccccagccttcttcctcaatcatccggcacacttcttccgcgccaaacacgagggaaacgggcggggtgaacggtgttgtcacggcttcatcatatgaatcgatataccggttcaagtcgagataaaaccgtttttccggtccgttcttgattgcctctttggcccgtttattgacggcgacaaaggcaaggcccggcggcagcatgagcgctttttgcgaaccggaaacaaggatatcaatctggtaatcttccatatccgcgggcacgccgccaatgcagctgacgccgtcaacgatatacaaggcatcggtcagccgttttacaacggcgccaaggtctttcaccgggttcaacaccgaggtggatgtttcgcaaaaggtggcaaaaaccgctttgaccggatcttttagccccttaaggaacgtttccagctgttccgggcggcaggcggttccccattctatattgaggcggtggacatgggcgccgtatgattcgcaaatggaagcaaaacgctccccgaacacgccggtgacaacgacaacgacatggtcgccttcatggacaacgttgcagacggcgctttccagtgcggatgtcccgctgccggcaatgacaaccaccggttcttttgtgccaaagaccggcatcagttttgtcgccacttgcttcaggctatttgaaaagacttcactgcggtgggcgaccataggctggttcatggcctgttttacacggtccggtacgggtgttggacctggtgtgaatagcgattccttacaaaaaagcatgagtacgtcaatcctccaatataaaattaaaataaaacgcccctccgccacaaagaaatccttgtggaggagggacgtcatgtaccgtggtgccaccctcttttgctgcgtacggcagcctctgggaaaataacggcatatgccgggtgcggcctacatcactttcggccggccagttcagaagcgctgggcattgtatcagcaaaagcatcggttcgcagcaaccaccgactctctgcggctttttgcaaatacgccttcttcatcattacttttcgaatatcattttgctctgtgctaaatattctaacagctggttttagttctgtaaagggaaaaatgaaataatttaaaaatcatcgtattttttgattcgcgcaaaaaggttaataaccttttttgtagtcgacaagatgaatgtccggcttgctgccagcgaggtaccgttttaaattcgggatgaagatatcccggacaacccgttcgtcgtaatgttcggttgagccggcggtgtgcggggtgatgatcacattttccagctcccaaagcgggctgtcttcagggagcggttccttttcaaacacatccagcccggcgccggcaatttcgccggaggcaagggcatcggccagttctttttcatttgcgatttcccctctgccgatattgataaaaaatgcagacggcttcatccgggcaaatgcttctttcccgaataaatggtacgtttctttcgtaagcggcaggcagacggcgacataatcacaaagcggaagcatatcatggagctgcccgttggtatacatttcgtctacaaacccggcaggcgcaccggaacgccgcacgcccagcactttcatcccgaaggctttggcaatttttgccgtttcaagcccgatttccccgacaccgataatgccgatcaccttttcgtgcatttccagttttaacccggcatggtcccatttctttttcgtttgatttctgacatatgtatggattttccttgtcaatgccagcatcattgcaaaaatggtttcagaaatcggataggcgtggatgccgcttgcggaagtcagaaagagcccctttttctcaaattgttcgagcgggaaactgttcacccccgcactccagctttgaacccagcggagagcggaatcttccgataatgcatctttttccattttctttcgaaagctcgcaattacttcagctttcttcacttcactctgccaatgcgccggatcttttccggccagtatgcgccattccggaaccagtttcctgatttcaccaagcaggccgggggcaagattttctgcaataatcatggttctttccgccatcaaactccctcctttattccattaaatcatatattcgatataccataaaaaatttcctgcttattctggtaattcctgccataaacttttcacatttgcaaaaaccgccatcccttcagcctgtaagccttatcaattatttgcacgcatgtttccgggtataaagacctatgaaaaagtaactaaaaggtacgataaaagaattggtgatatccgcaaaagaattagtgatatccgctatgaaaatgattaaaggagttgccctgttatgcgaaagatggtagaaaaacatgtacgatggaatatgaaagcgaaattgattgtttctatcctcgcgatcctgctcgttccatctgtactgatcggatatttttcaataaaatcagcaggaagtgaagtccaatcgcaaatgctgaatgccgctacggaaaatgtcaatctgttgcagaatatcatccatgatgcgatccagccgagcatggatgatgtggattatttttctaaaagaatttcggcccaaacggaaaaaaaaccgtccgaaatcaagtcgatgttcagcctgtacgcaaacctgcataacaatgtccggaatgtttacgttgggacagcatccgggaaaatgatgatcgaaccgaatgtcaacttgcctgcaggctatgatccaaggcaaaggccgtggtataaggaagcgatggaacagcccggaaaagtgattgtgacagccccgtaccaggacgcgaccacgggggaaacgattgtcaccattgccaaaacggcgcaagacaactccggggttgtcgcagttgacctgaaaatgagcgcgctccaaaaaatggcgaaagaaatcaaaatcgggaaaaacgggtatgcggtgcttgtagacccggcgcgccgcatcgtcgtgatgccgggaagaaaaccgggggcgtatgcaaaagaaaaagtgtatgataccgtatttaaccatgtttccggacacacttcctatacgtatcaggggaaggaaaaaatgatgatttatacaaccgacagcctgacgggttggaaaattgcagggacaatgtatgccgatgaggtcggcaaagctgtacagccgatcattgaccggatgattcttgtcatcgtcatttttctcgttctcggtacggcattagcctattttgtcatccgttctgtgacacggccgattaaccgcctgaaagaagcggcattaaaaatttcctcaggggacttaacagaggaaattgatatccggaaaaaagatgaagtcggcgaactggctgtaagttttaaaaaaatgcaggacagcctgcgcgaccttctcgaccaggtcgataaaagcgcggagatggtcgtttcctcttccgaagagctgaaggcaaatgcggaaaatacaacgcaggcaagccatgaaatcaactccgctgctgcccagattgcaagcggtgcggaaacacagacgaacggcacggaaaacagcgcccaggcgatgagcgaaatcgcaaaagcaatggaaaaagtaaccgacagtacgatggcgatttccagcctgtccaatgccacgcttgaacatgcgaaacaaggcggcgaggctgtccgtgagacggttgcacaaatgaagtccattgccggttctgtcgcgcaatctaacgcaaaaatccaggcactctttgaaaattcgaagcaaatcagccaaattacagaagtgataaaaggaattgcggcccagacgaatttgcttgctttaaatgcagcgattgaagcggcaagggcgggcgagcacggaaaagggtttgcggtcgtggcagacgaaatccggaaattggccgaccagtcgcaaaactcgaccaaagaaattgaaaagctgattacgcaaatccagcatgatacggaagattccgtccgcgaaatggaacaagtgtccaaagatgtggaagccggcgtgtcacgttccaaagattcgatcggaaaatttgacacgatcatgaacgggatgaaagaaatcacaccgcaagtagaagaaatggcggcgatctcggaagaaatttccgcctccgtccaggaagtgacttcgactgcgaacgaacttgcccaaattgctgaagaaaatgcggcggcaaccgaagaaatggccgcttccattgaaagccacctgaaatcgatggatgacatcagcgattcggccagagcgttgtcctatctggcggagtacttgcaggaaatggtgaagaaatacaagttttaaagaagaagcgcccaaagcaggaatcctgctttaggcgctttttttggcgcatggattcaactgaaaacgggttccgcccgggcaaagcaaaaggcaatgcaagtgcgggaatttttggggatgaattttgcccgccgcacaacggctgtggcagttgccacgcgagaaaacgatggagcagcggccacaaaagggcttcggagcgccggcaaaatattttcggtgacaatggctccggcgtcctttaaaataaaactatgaagcggatgaacaaattttttgaaaaaggaaatgaccttatatgggggaagagaaaagcatgcatcaatatgtcaattggcctgatgtggtttttcagttgggctggcttatttttctttgtgccgccggatttgcgatttataaaatcttgaaaatcaggaaaatgaagactcagcatttgaaaaaatagtgcaggaacggctctggacctctccggagaaagggctgcaggacgggcaaaaacgggaggaaatgggatggaactcacaaaggaacaatttaaggccgatttcgaaaggatgctgtcggactgcttcacaatggatgtggaaaaatctgatttgacagaacagtatgtgacactcggaaaattgatcggttcatatgcagcgaaagaatggcggaacacgaatcagcgttacttggaaaaaggggagaaacaagtttactatttttcaatggaatttttgctcggcaggatgttgaaaagcaatttgttcaaccttggcattctcgatacagtccgggcggggcttcaagaaatggggatggaactcgaggcattggaacaggtggaactggatgccgggctgggaaacggcggccttggccggctggcagcttgtttcatcgactcaatggcgacacatgcgatccccgggcacggaaacggtatccgttttaagtacgggcttttcaggcagaagtttgtcaacggctaccaggtcgaactgcctgaaaattggctgcggaatggcaatgtgtgggagacccgccggctgaacaaggcggtaaatgtgcggttttacggcaacgtccggcttgagaaagacgcatcgggacatcttgtcccccattatgaaaatgaagaaacggtgcttgccgtgccgtatgataccccggtaatcggttacggggacaacacggtcaacactttaagattgtggtcggcagaaatgccgcttgaggatgcgaacacggagtaccatgcttttattcagcagcagagccggatcgaaagcatttccgaagtgctgtatccggacgattccaattatgaagggcgcctgttgcgtttgaagcaagaatattttttcgtctcggccggcattcaaagcattatccgcacctataaaaaactcggcctgccgattgcgcatctggccgaaaaagtcgccatccacatcaatgatacacacccggcattgtgtgtccccgaactgatgcgcattttactggatgaggaagggatgggctgggaaccggcatgggatgtgacggtaaaagtgctcagctataccaaccataccattatgtccgaagcgctggaaagctggccgacagatatgatggcacagcttttgccacgcatttatcaaatcatttgcgaaattgaccgccgctatatagaggatatggcccgtttgtatgaccgggataagattgagcggacaagggtgatttcggacgggagcgtgaagatggcacaccttgcgatcatcgggagccacagcatcaacggggtggcaaagctccatacgaatattttgaaagaaaaagtgcttcgtgacttctactgcattttcccgtccagatttaacaataaaacaaacggcattacccaccggcgctggctgctgctttccaatgaaccgctgcgtagttttattgacagcaaaatcggcagggagtgggcggcgaaaccgactgacctgaaaatgctcgaacctttccgccgcgacgaaagcgcactcaggcaacttgccgaaatcaaacaaaccaataagcagcggctcgcggactatatcgagaaaacgacagggcttgccatccggacagatgccatttttgatgtgcaggtcaaacgtttccatgcttataaaaggcagctgctgaatcttttgcatattttaagcttgtattttaaattgaaggatgaaccggaagcagatatttacccgcgcgtcttcatttttggcggcaaagcggcaccgagttacacctatgccaaggaaatcattaagctgataaacgcagcggcggatctgattaaccatgacccggcagtgagggacaggctgaagatcgtttttattgaaaattacggtgtgtcgctggccgagcggatcatcccggcggctgacgtgagcgaacagatttcactcgcatccaaggaagcgtctgggacgagcaatatgaagtttatgctcaatggcgcggtcacattggccacgctggacggtgccaatgtcgaaatccgcgatctcgtcggggaggacaatattatcctcttcgggctgaccgatcaggaagttttccaatattaccatgacatgtcttatcattcttatgattattataagaacaatccggtgctgcaccgtgtgctcgatgcgctgattgacggctcgattcctggggtgcaggcggaagggcgggatgtctttgattccctgattaaatacggggatgagttttttgtattaagagatttcgaggattacgcgctggcgcagaaaaaagtggacaagctttaccgcgagccgctcaaatggcaggagatggcactcgtcaatattgccaatgccggcgtattttcctctgattataccgtgctcaagtatgccggcgagatttggaacgtgcatagcaaaacaaggcttttttaacggatttctgaaaggcttcctgcaggggaaaactcgaaaaggactgtttgctttcagctgctgcatactgcccggaattcctccgctaaaaagcagccggcaagggccgggcttttcatggggggaccgggcatccagcagcataagccgttttccgaaattaaattttgtccgaatttttgcttttctgcaggaaaatatgccggcttggcgagtatcatccaatagatttccggcaggaggggcttaaacggcattggatcagtcattaacagtttaacctacttcattagcgcaattgccgggatttcgctgtttattgctgggattggtgtaatgaacatgatgtatatttctgtctctgagcgtacccgggaaattggcattcgtctcgctatcggcgcaaccccaaagcatatcttattccagttccttttggaagcggtgttgttgacgggaataggcggcttgattggttttgggataggtggtggactcgcgtggcttatttcgctcttcttacctttccgtgccgtgatcggtgtaggaagctttttactcgctttttgcgtctctacctttgtcggcattctatttggcatattgccggctaaaaatgcagccaataagaacttgatcgatattttgcgttaggatgttgattggaagaatacagtggtctaaacaatgatgaatgtgcaaagtaaaatgtcctaaccggaccccttcttcgaacgaagtggccatgcgtgccctttcgcgtattttttcccgggcaggctaagccactttttcacaagaaagacaaggtttgtccgccaaatgttacttggaaaaatgggctgaaaaaaataaaaaaaatttttgaaatgaaggttgacaatttttattttcagcattaagataataatcaatcaatgaaacatttttcaggcgatgaagaagaagagtaacctgtgtggattccgaagagagccggtgggtggtgcgaaccggtgatgacgtgcaggcgaatgggcttccgagcttccaaaccgaaacgattccggagtaggctttggcgaatgccttatcgttacaagaggcaggtattacgttttttccctgataccgtcaaagccgggctgataaagccaataaaggtggcaccgcgggttccccgtcctttacatggattgggaaccctttttgcgttccgttaaaaatctcataaaagaaaatcgctgagtaagaagagtatgcaaatggtaagcgtcccagagagccggcgcaggtgggagtccggcacgactgcctttgcagaatgggcttacgagaggtttcctgaacttgtgcagtagggaaacacggcttcccccgttaccgggatagggtataaagagtggcttgctccgtacccgaataagcggaaaggttttaaatcctttcaagagaggtggcaccgcgttggaaaacgtcctctgtcctgcagcatacagctgcgggcagaggacgttttttttatttagccgggacccgggatctgtatcggaacccgcctgttaagcgaaggatatacagccggtgcagaggtgaagagccggagcgcgaaagacggcctgctagttaccatttcaataaaaaaggagtgcggacggatgcaatacaaaatcgttaagctaaatggcgatgtgttaacgccggtcatgatttttacgagactgagaggaaaatgcaagtttttgttcgaaagttcgctgcaaaatgacagcaacggccggttttcttttatcggggctgatccggtaaaagcgttcatcgggcgggataatgaactggaggtgattgaccggatgacggggcggcgtgaaataaaaaaaggtaagccgctcgatcttgtcaaaggcctgttgccgcgtcttaatatccagcttccctttccgttttacggcgggtcggtcggctatatcggctatgacgccatccgccagtatgaagaaatcggccatgtaccggaagatgaaacaggaatcccggatctgcatttgatgctgtaccaaaatatagctgtttacgaccataaaagccagaccgtctaccttgtttcaaccggggaagacggggaggcaatagaaaaaaatcttgcggcaatggaaaaagcgatctgccggcagacaagcgcagaaccatttgtcgaccatggcccggttgactttgcccccgccattcaaaagcaggcatttatgaagatggtcgaaaccgcaaaacagcatatcgaaaacggggacattttccaggttgtcctgtcacagcgtatgaaagggacgctttcgcacgatccgttctatttttaccggaagttaaggaaagcgaacccgtccccgtatatgttttatctcgacttcggcggttatgtcgttctaggggcatcgccggaaagtttgatcaaaacgaaggggcgtgtggtatatacgaatccgattgcgggaacacgcccgcgcgccaatgccccggaagaagatgagcgccttgaaagcgagcttttacacgatgagaaagaactcgctgaacataaaatgctcgttgatctgagccggaacgacctcggccgggtgtgcgagcccggcagcatccgggtgcaaaaatacatggaagttgagcggttccagcatgtgatgcatatcgtttcggaagtgcgggggaaattgcgggacggttttagcggaattgacgcgctcatctcctgtcttccggccggcacggtatcaggcgcgccgaaaatccgcgcgatgcagattatcaacagcctggaaagcctgaagcgcggcatgtacgcgggcgcggtcggctatatcaatctgaacggcgacattgattttgcactcgccatccgctcgctcctgattaaagacaacaccgcttatttgcagtcgggcgcgggcattgtgtacgattccgatccggaaaaagagtatgaagaaacgctcaacaaggcgagatcgattctggaggtacagacgcatgattttattgctcgataactatgattcgttcacttacaacttgtaccagtatttatgcgaacttggggaggaagtaagggtgttccgcaatgaccggatcaccatagatgaaatcagaaggctcaagccggaagcgattgtcctgtcaccggggcccggcgtgccggaagatgccggcatttccattgaaactgtaaaaacattttaccggcaagtcccaatgctcggcgtctgtctcggccatcaggcaattgccgcagcgttcggggcagggatcacaaaagcaaaagaaatcaaacatggcaaaacttcccttgtacgccatggcgggaaaggaatgttcagcgggcagccggatccggtcgaagtgatgcgctaccactcgcttgtcgtggaccggacaaagatcccggaagtcctggaagtggttgccaagtctcttgatgacggagaaatcatggccattcaacataaatccgccccgtgtttcggcgtccagtttcatcccgagtcgatcgggacggaaaccggtaaacagatgcttgaaaactttttacgcgaaatcagaaaggatgagaaagttgaaaccgtatcttgaaaaaattttggcacaagaagggctgacggttgaagaaatgcgggaagcctctcgtgcactgttttctgatgaagtgacagaaggggagatgggcgcatttttagccgccttgaaatgtaaaggcgaaacggcggaagaaattgccgggctggtcgaagtgatccgtgaaaaagccgtgccggttccatgcaacgttccagggcttatggacaactgcgggacgggcggggacggcagccacagttttaacatcagctcgacctccgcgtttgtgctggcggcaagcggcgtgaaagttgccaaacatggcaaccgcagcgtctcaagccagaccgggagcgccgatgtcctagagacgctcgggatttccttgtctttcccggcggaagaaattgaaggcttgctgagagaaatcggcatcgtcttcctgtttgccccgaatgtccatccggcccttggaaaaatgatgaaaatccggaaagatttgcgaatcccgacgatttttaacttgatcggcccgctcacaaatccgatgaacctggaaacacagctgctcgggctgtaccggcgtgacatgctcgggacgatggcggaagtgctcggccgccttggcagaaaacgcgcgctcgttgtcaatggcgccggctatcttgatgaagcgtcattatccggggaaaaccattttgcgctgcttgacggcgggaagattacgatgtttacgctgacgccggaagaggttggcttgccgtattacccgctggaagcgatccgcggcggtgatgcgcaaaaaaacagcgatattttgctgtcagtattaaaaggagaaaaaggcgcttaccatgatacagtggtcttcaataccgggcttgcgctctttgctgcagggcgggcagagacggtaaaagaaggaatccagattgcggagcaggcaatccgttcgggcgcagcacttgaaaaactgcacgcactcattgaagcgagccggaaactcacgcaagaagcgatttgaatggcaatttccgaaacatttttacccggaaaagaaacgagaagagcaatttcagggtgtgaactgcacgcacttattgaaataagcctgaaactcacacaggaggcgatttgaatggcgtttttggaaaagattttagccgaaaaagaaaaagaagtggcccgtataaaaggtgctggaaaggcttttgccacaaatgtgcgcaaagccccgtccctttatgaaacttttatgcagtctgaaaaaacaagcattattgcggaaatcaagcgggcctccccgtcaaaaggggatatccggacggccgtagatccaatccggcaggcacttgcctatgaaaaagcaggcgccggcgccatttccgttttaacggatgaagccttttttaaagggtcagtggaagatttgaaagccgtaagcgatgcagtccggcttccggtgctctgcaaagactttattatcgatgaaattcagatcgaccgggcaaaagcgtatggtgcaagcgtgattctcctgatcgcagcggctctttcccccgaaaggctccggcagctgtacgattacgcccgggacaccggtcttgaagtgctgctggaagtgcacaatgaagcggaactcgaaaccgctgtcgaaacaggggcccggatcatcggcatcaacaaccgcaatttaaagacgtttgaggttgatctcggcgttgttgaaaagcttgcgccacaaatctcaaacccggacgtgcttgtgatcagcgaaagcggcatccgcacccggaaagacgtcgtccgcgctgagcatgccggggcaaaagggattttagtcggggaaacgcttatgcgcgcaaacgacccgcaaacggaaatgaaaaagctggccggtgttccggaaaaacggaaagtaaagatttgcggcattcgcacgcttgaagcggcccgggcggctgtttgcgcgggggcggacatgatcggctttgtatttgccgaaagcaaacggaagattacaccggaaaaagcggcacagattgcaaaagcgttgccggaacatgtcgaaaaagtcggtgtattcgttaatgaatctcctgaaaaaatggcggaaattgcagagcgggccgggctcgattacctgcagctgcacggcgatgaaacagcggaggaagccgcgcaaatgccttacccggtgatcaaagctttcccggtaaggacagatgctgatcttgatatcatacacggttaccattgcgatctggtgcttttggacagcgccggcggaaaataccgcggcggaagtggaaagacgtttgactgggagctggcaaaggcgctatcggatgagcgggcggtgatgcttgccggcgggctcacgccggaaaatgccgaagccgcgatccttgctgtctgtccgtatatcgtcgacgtttcaagcggggtggaaacaaacggagaaaaagacccggataaaatcaaagcatttgtgcaagcagcaagaaaagcgtttcaaaaattagaggagcgtgacaaaaatgcaaacatacaaactgcctgatacaaacggccgtttcggaactttcggggggagattcgtaccggaaaccctgatgccggctgtaggcgaactcgagcaggcttatcatgaggccatgaacgacccggcttttcatgcagagctggataaattgctgaaacaatatgtcggccgtgaaaccccgctttactatgcggaaaatttaacggaacttggcggcggcccgaaaattttcctgaaacgcgaagatttgaaccataccggcgcacataaaatcaacaacacagtcggccaggcgctgcttacgcttagaatgggaaaaaagaaagtcgttgccgaaacgggcgccggccagcacggggtggcaacagcaaccgtctgcgcgctgctcggccttgaatgtattatttttatgggggaagaagatatccgccggcaaaaactgaacgtcttccggatggaattgcttggcgcgaaagtcgagagcgtctcgcaggggagcggcacattgaaggatgcggtcaacgaggcgctccgctactgggttgcccatgtggaagacacgcactatattatgggttcagcagtcggcccgcatccgtttccgcaaattgtccgcgatttccaaagtgtgattggaaaagaaacgaaaaaacagattacagaacagacaggcagacttcccgatgcagttgtcgcctgtgtcggcggcggcagcaattcgatcggcatgttttatccgtttgtggaagataaggccgtaaaattgttcggtgtggaagcgggcggtgccggccttggaaccggaaagcacgcggcgtctttaagtgacggcaaactcggcgtgcttcacggaatgaaaacgtatttgctgcaaaatgatgacgggcaaatccaggaagcttattcggtatcggccgggcttgattatccgggagtcgggccggaacacagttatttaaaagaaacgggccgggttacgtatacgtctgtgaacgacgctgaagcattggatgcattccggctgctttcgagaacagaaggcattatcccggcactcgaaagcgcccatgccattcgttttgccctgaagctggcaaaaacgatgggaaaagacgaaacgatcgctgtttgcctgtcagggcgcggggacaaagatgtagaagccgtcagccatttgcttggaggggaaaacaatgggtgaaatttttgcattggaaagcgcccatgccgtccgtatggccctgaaaccggcaaaaacgactgccgtcctgccaggatgcggggacaaaattggagaagcggccagccgcttgtttggaggggaaaacaatgggtaaacaaaaattggaagcacagtttgaagcggttcttgcacgcggtgaccaggcatttgtcccttatattatggcgggggacggtggaatggaagagacggagaaaaggcttgcgtttttggaagcttgcggggcaacggcaattgaacttggcatcccgttttccgaccctgtcgcagacggtccggtcatccaggcggccggactccgcgcttttaaggcaggcacgacaatgaaaaaagtgctgagccatttaaaagcccatccgagacaagtcccggttattctcatgacgtattttaacccggtttttgcctatggtctggaaaaatttgcagcagactgcgcggctgccggtgttgacgggctgattattccggatttgccgcttgaggaagaggggattgtcgccggagaactggcaacatgcggccttgcgctcatccggctggctgcgattacaagcccgaaagaccggcttaagaaaatcgcctcccgctctgaagggtttctgtatgctgttacggtcaccggcacaaccggcacccgcacaagttttcacgacaatatcgaggattacctcgctttcttatcaagcatcagccgggtacctgttctcgccggctttggcgtttccagccccgagcaggtccgccgtttaacccgctactgcagcggcgttgtggccgggagcaaaattatcgagctctttcagaacggggaaacggaaaaaatccgtgcgcttgtggaaagcgcaaagcaacaagcagcaccaaaccagctgtaaaaatgcctggatgcatgctccgaaccggcgcacatgctgcccatacatttcccacaggtttatccacatccggaatatgcaaagaaaaggatataggggcggttatccacaatatccacattttatacacaaaaaatgtgcacaattttatacacatcaaaggatattgtcaatagaggcattgaaaggtttatgcacatcatccacaaaaaacgggggcccaatggaaaggccgcccgtttttattttaccgcctgtttttcgctcttttttccgcagcatcggaacgggcctgtgcttccaaatcttccccgtctgcgagttccctcgaatattcaatgtcttttccgtccattttcatgttcttcggtacttgcggcagtgttgctttatttttatcgcgtgttttatgctgatgcccgcggcccattgaaaaaacccctttcaagcagtttgcggttgcctccgcaaaactactttttgcgtaaaaggtttttcttaaacaggtaattatttgcgccctctgtccgtgtatcctccggcccggtcggcttttttaaattcgtgctggtaagtcacttcctgcatgcttcttaatgtgcttttcgtctgaacttttttatctttcggcattcgcaaaacctccttttttggattattgttcccggtaataccgctttctacactttcaatggtaaaatagacaagggaggaattcatgtgcctgtcattacaaaaatttcgcttcaaaaaaacaataaagaacgatacaatatttttcttgacggaaagtaccggttcagtgttgatgaagaagtgctggcacggtaccagcttttaaaagggaaagaattggatgagcttgatattgaagcgatccttgccgaggatgatatccggaaaggcgtcaataccgccatccgttttctttcctaccggatgcggtcggaaaaagaagtgcgtgatgatttgataaaaaaggaatttgcgccggaagtcgtccggagtgtcatatcaaagctttatgaaatgcagtatcttgatgatgcggaatttgccgcaagtttcgtgcggacacaaatgaatacaacgcataaagggcctgttgtcattaacagggaacttcagcaaaaaggcattgcaccagagatgatcgaaaaagcgcttgaaatttttgatgctgatcagcaagtggaacatgcccgtgcccttgcagaaaaactttccaggcagcatgcccggttgtcggagaagcttttaaagcaaaaagtgaagcaggggcttacagtaaaaggctatccgcctgaagtgatttccgctgcgatggcggcgcttcatgttgaaaaggatgaagaaacggaatggaaagcacttcttcagcatgccgaaaaagcaaagcgcaaatacggaaagttttcgggatatgtatacaggcaaaaaatgaagcagtttttataccggaaagggttcccgatggatttgatagagcgctatttgcgggaagagggggattaaggatggaaaaaagatacagtcaaatgagtgaatatgagttaaaacaggaaattgcacaattgacggagaaagcgcgcaaggccgaacaactcggtattgtgaatgagttcgccgtgctggagcggaaaattgcgatggcaaagtcgtatttgctggaccccgcttcttttcaaaaagggggaatttataaaattgaaggagaccccggcgcctattttaaaattgattatatcgacggcgtctttgcctggggttaccgggtcagcggcggcaaaccgatcgaagccctcccgatttcgatgctgaaacgggtggattgatttgttactcttttacaggggatcaaaagaaatgggcccggtgctattcaacatgtaagggctgccggcatcatccagcagccctttctgtcatgactcttcgcggcggcctgatgcgcgcatgcgttcctgcggatgcgtattggtcgtgccatccgcgcgtttcgaagcatattcggcttttgcctgcggtttgtcttcatatacattgtcatgatcgtacgggaaacctttttctttattccgcatgttcatgccctccttaacaaaataaccggtggggaatgccccgcaccggttattttgcacgttttcagacggaaaacgtgcgccttatcttggtacaatatcaagttttttcttcagcttctctttattaaaaatccaaccggtataagagccgattatttccagatcttcatttaacttcacaacagcaacaaacggataatgcccgtttttccggtagcggagatcagtaaagcggacttcccagccgttatccagttccttgatctgccagttatagacaggggaaaaacttaagaaagcagacaaatttttatcttgctttgccacttctaaaattttattttccggaaccggaagccgtttgaatttgtcaagaatggtgaccgccgatttaaacgcaaatgcaacatagtaggcatcttttgttcttacggcaatcttccattgatgaaaatgaatggtcggggaaatgatgattctttccgcatccggaatcctggccagcacggctttttttacatggtgacgtgccgtgaatctggcgatataatataaaaatatgaagatgtacatgaccagaaacgtcggccccggttgtgccccgaacaaccaggcggcaatgccggccacatggatgataaaaatgaacgggtcaaatgtgttgatcacgccgagcgcgatccatttatatgagaatggtcgcagtgcctgtgtcccgtatgcattaaagatatcgacgaacacatgcagaaaaacagccaaaaaagaccaaagccataaatgaagcgcatcggttccagggaaaaagatgctgagcactgctgtaatggcaagcggccacagcaagacagccggaagagaatgtgtaatgccgcggtggttgcgaatataaaccgcattatttttaaatttgagcagagtatcgatgtctggtgcctgtgaacctaaaaccgtggcaatgagaacgctgtgaaaatgaaccgcatcttgtgcgaccacagggtccaacgttgccaaacctccgagtgcaatgcccataacaacatgggttccagtatccaatcttattcctcctaaaagtggttctggctccttactaaagcgcttatttctttcatcatgccttcatcatatggtaaattaagaagaattgcaatagacaaaggcggtcaatcaggattttctgtttgtatttttcccgcttataaaaagttatagcaatcatttgggggaattaaacattgaaaaattttccagtcggcgactttgatgtaaaatcttttcaagaggatctgatctcctggtttaaaagggaacagcgggacctgccatggcgggaggaccgcgacccgtataaaatttgggtatcggaaatcatgctgcaacagacaagggtggacactgtcattccctatttccggcgctttatggaaaaatttccgacccttgaagcgctggcggatgccggtgaagatgaggtgctaaaagcgtgggaagggcttggctactattcacgcgtccggaatttgcacgctgccgtaaaagaagtgaaggaacattatggcggcacggttccggacacaccggaagaagtttcgaagctaaaaggcgtagggccctatacggccggtgcgattttgagcattgcatacggcttgccggaaccggctgtggacggaaatgtgatgcgggtgctttcaagaattttatccatatgggaagacattgcaaagccttctgcaagaaaggtttttgaagaagccgtccgcaagttgatttctcaggagaatccgtcttattttaatcaggctttgatggaacttggtgcgctcgtttgcacgccaaaatcgccgtcatgtttgctttgcccggtccgggagcattgccgggcgtttgcagagggaaccattaatgagctgcctgtgaaatcaaaagggaaaaagcagaaacagatccggctccaggcggccgttttggaagatgaagacgggcgcattttgatccataagcgtccggataaagggctgcttgcaaatatgtgggaatttgttcaagtggaagaaagtgccgttttgccggcgaggcaggtattgaaggactatcttggagaggcatttcaaattgaagccgcactcgagacggagcattttacggaaatacggcatgtttttacccatttaatttgggacatccgggtataccgcgggaaaattttaaatcatgtgcaggaaacggatgaactaaaatgcgtgcttcctgacgagattgaaacgtttgcatttcctgtgccccatcaaaaaatctggaaagccttccgggtcatcagtaagtaatgattgcaaatttgctggaaaatgcagagatttcttgtcataattattgttgaaaataatcaggtttggttatttcttcttgcaatggaagggcttaaacagtttttaataacttataaaaagttataaaatttttgtttactttataatttattatcaaatgaataaggagggttatttatgtacttcaagttttctcttcttagttttataactggtctaataatgatttttgttattcaattagcaacattttatagaaatttacaaataaaaacggggagaatggatggagatacgacctatactctattaagttctagtttaatagttattccgataattttatttgttttagcgctaatcttttttcagttgcatatcaaagataaacaaaaacattaaaaatctcttatttgggcttgtacgtggttttaagaatacgatgatataggcaacacgatgagagttatatttgaagtggatttatgaagttccctctttcacgattaatcgctatgaaagaaaaaaaggacgaaccgcaagccaaaatgtccttcaaaagggcattcagcaacaaaacagccccgagctttttgaaaagcttggggctgttttttatgcagatggctggcaggccgctttgtttttttgtgagagatacaggtctatttcttttgcggcttttttgccttcctgcattgcccagacaatcaggcttgcgccgcgtttcgcatcgccggcggcaaaaatgccttcccgatttgtccggaaactcccgggcaaggtgtgtatcagcccgttttgaagttcgatgccggctgatttggcatcatcgacaccctggaatccgatcgcgatgagcacaagatccgcatcccatatctgctgttccgctccccgctgatctgaaaacggcacggtaacaagccctgttacttcgccgttatcattaccgagaaatgctgtggtttggatataatattgccgcggatcttccccgaacactttaaatgattcttcatatgcataatccagtgtgaacagggaagggttcaccggccatggttcgtgttccgggcgttctttcggcagttctccgtgctttccgaactgtacgacgctcttgcacccttgccggattgcggttgccacacagtccgcaccggtatcgccgccgccaatgacaatcacttttttcccttttgccgaaatttgcggttcaccgttttctccatggtcaagcagatgttttgtgctggctttcaaatatttcattgccgggtagatgccttttaaatcacgccccggaatgtccatgtcacgttgtttctccgcgccgatgcaaagcaggacggcgtcaaaagcagcctccagttctgcaagcgtgatgtctttgccgatttcggtattggctttaaatgtgatgccttccgcctgcaacaggtccactctgcgctctacatactgcttttcaattttcatattcggaatcccgtacatgagcagcccgccaaaacggtcttctttttcaaagagggtaacatcatagcctgcctggtttaaatcgtcagctgccgtcaatccggccggcccgcttccgacaacggctgcttttaagccgttccgtttcagcgggattctcggcttgatccagccttcttcccaggcacggtcaatgatggctctttcaatgcttttaatggtgacaggttcactgaccagcccggctgtgcacgagccttcgcatggtgccgggcaggcgcgcgatgtgaattccgggaaattattggttaaaagcaaacgctggtaggcctcttcccattttccctgggcggcaagggtgttccattccggaattaaattatacaaagggcagccgctcgtttgcctgccgatcagttcccccatctggcagaacggggtgccgcattccatgcagcgggatgcctgcgttctcagtttttctgccggaaatggctgcacgtattctttccatgtagccacccgttttgcggcatccagttctttcggtttttcacgtttctggtcaacaaaatctgtcgttccgcgcatgtctcacactcctcacaaatcacccggccgctgccggagggatatagatgtcgtacaatttcagcttttttccggaaaaaagtttccgttttgcgtgcgatgctccatttttcttaaaacagccatcctcgtgcttcttatcggtccgctgacgggacatgataggtctccgttttttttcgtttcaatccacacacaatcctgtaaatccatccggacgcttccggatggatttacccatctactttacttctgtcgggaaagctttttctttttcgatttccggcaggtgctttccggattttttatattcaaaagcggcaagcctcgcttcatcaagcggcatttgctgatccaggaagtactggatgagttccatcatcgctttgtattcgcgtggaacaatcttgacaaactgatgcagggccagctcccaattcttcaaaatccgtttggcaacagggctgccggtgtattgataatgtttctggatcatatggtaaagttcgcgcatatcttcatcagaatccacaccttcaatgctgacaagttcctggttgatccgggataaaacttcatcttcacccattgcgccggtataaatgtaggcaatcccgccggacatcccggccgcaaagtttttgccgatcgggccgagcacggcaacgcgtccgccggtcatatattcgcagccgtggtctccgatgccttcgacaacggcatgtacgccgctgttacggacacagaaacgctggccggccgttccgcggatatatgcttcgcccgatgttgccccgaaaaaggcgatgttgccgatgatggcctgttcttcgtcccggctccatccggcacccggcttcacaacgatttttccgcccgataatcctttcccgacgtagtcattggcatctccttcaaggttcagtgtcaggcctttcgggataaaggcgccgaggctttgccctgctgaaccatgcagatgaatgtggataaaatcttccggcagcccttcgtcaccgtaagtttttgtaatgatatggcccaaagtggtgccgattgcccggtcggtgttgcgcacaggcaaggtgacggctgtttgctgcctgttccggacggatacggataaatggttcaattcccggctgtcaaagcgttcttccagtttatggctttgcgccgttttgccttgcacagcaaatggtgtatcacccgctttaaacagtaatttatcaaaatgaagctgtttcgctttccaatggtttttaacctcatctttcactttcagcaagccggtttcgccgacaagttcatcaaggctgcggtagccgcattcagccaatatttcgcggacctcttctgcgatgaaccgcatatagttgacaacatattccggtttgcccatgaatttggcgcgcagcttcggattttgcgtggccacgccgaccgggcatgtatcaagatggcaggcgcgcatcatgatacagccgaggacaacaagcggggcagtggaaaacccgaattcttcggcgccaaggcaggcggcgatgacgacatcacgcccggtcatcagtttaccgtctgtttccagtacgacacggtcacgcaggccgttcagcgttagcgtctgatgggtttctgcaaggccgagttcccatggcatgccggcatgtttgatgctcgtttgcgggctcgccccggtgccgccgtcatggccgctgattaaaatcgtatcggccaggcctttcgctacaccggccgcgatggtcccgacgcctgactttgccaccagttttaccgaaatgcgggcgcgcgggttggcgcttttcaaatcgtaaatcagctgcgccaggtcttcaatcgagtatatatcatggtgcggaggaggcgagattaaaccgacgcccggagtggagccgcggacttcggcaatccacggataaactttcgagcccggaagctggccgccttcgcccggtttcgcaccctgggccattttaatctggatttcgtccgcatctgttaaatacaggctggtgacgccgaaacggccggatgccacctgtttaatggcgctccgtcttgaatctccgttcgcatcaggcgtgtagcgttctttttcttcgccgccctcgccgctgttgctttttccaccgatgcggttcatcgcaatcgcgagtgcttcgtgcgcttctttgcttaatgccccgtacgacatcgcgccggttttaaaccttttccaaatcgattcgaccggctccacttcatccagcggaacaggtttccggttgctctcgatggccagcaggctccggatcgtggcgtacggaccgtggtggtacgtttccgaaaatttgcggtacagttccttgttgttcgttctggttgcctgctgcaaagtgtacatcatttgcgggttgaacaaatggtattcgccgtctttccgccattgcagctcgcttcccggatcaagcgctttgttgtgctggaaaagcaatttctgcgctttttcaaaacgtttcaatgattcctggccgatttccgcgagcccgatcccgccaagctgcgagacggtgccggtaaaatagcggtcgcagacgctttccgcaatgccgagcgcttcaaaagtttgcgccccgcgatagctttgcatcgtcgtaatcccgactttcgacatgattttgacgacgcttttcttaagggtggttaaatagttttcacttgcttttttatacggcagatcgatatgcccttcgccgattaaattttgaatcgtttcaagtgcgagatacgggtgtaccgcatcggcaccgtagcccaatagagcggccatatggtgtgaatcccgcggttcaccggaatccagcacgatgcttgctttcggccttgtgccggagcggatcatatgctggtgcagggctgaaacggcaagcagggaagggatcggcacggcacgatggccttgcgcacggtcggaaagaattaaaatttccgcaccttccccgattttttcgtccgcttccctgagcaattgttccagcgcctggtcaaggctgatatccggcgaatggtacgcaggaagaaaagccgttttcattccctggtttaaaatggcgttaaatttggccgtgcttaaaaacgggtgttccagccggatttttttatgggcggtatcgtcatggccgtcaagcgatacttgcgggccgagccaggtaaccgtagatatgacgtatgcttcgcgaatggaatcaatcggggggttcgtgacctgcgagaagctttgtttgaaataatggaacaaaagctgcgggcgctccgataaaactgcaatcggtgtatcgacgcccattgccccgatcggttcattcttttcctgcgccattggcacgatggactttgtgcattcttcataagtgtagccgaataatgtctgccaataagccagttcatttttttcaagactggatgcagccgggataaagtggctttcctccaggtctatcactgaatcttcgagatgctctgcatacggtttttcaaggctgacctgtgcttttagttcgtcgctcgggataagggcccccttttcaagatccacgaacaacagctgacccggttttaaatggcgccgttctttgacgttttccggctccacatcgacgacgccgacttcagatgcaaaaatgattttatcatcatgggtaatgtagtaacgggccgggcgcaagccgtttctgtcaagcaccgccccgatttgttttccgttcgtaaactcgagcgccatcggtccgtcccacggttccataatctggctatggtattcataaaatgattttaagtaaggcggcaggtcttcgttgtcttcccacggctccggcaccatcatcatgatcgcatgcggaagggagatgccgtttgttgttaaaaattcaaggacattgtcaaaaatcgccgaatccgaaccgtttttgttgatcacaggctggatttttttcaatgtgccaaggtccagttcgtttgcaaacaattcgatttttgcattgaaccagttgacgttccctttgatggtgttgatctctccgttgtgggcgatcatccggttcgggtgggcccgctcccagctgggaaacgtattggtgctgaaccgcgagtggatcagcgcaagggcagattgaaaccgttcgtccgcaagatcagtgtagaacagagggagctgttccgccgaaaccatgcctttatatacaattgtccggttcgaaaaactggcggcataaaaagaggaaccgaatttgttctcaaccagtttccgcaatatatagatctttctttgaaaaaccgcttcttccgtgttatcgtttgaagaagaagaaacgaaaatctgaacgatgtgcggccgcgattcttccgcctggcgcccaagaacttccggatttaccggaacttcacggacaccgggcactgaaaggccgagtgatgcagcctggatgcggaattcattcagaatgtcctccgcagcatgcggatcatgcggcagaaaaagcattcccactgcatactcccctttttttggaagggtgaaggagcatacggcctcaaaaaacgcgtgcgggatttgcattgaaataccggcgccgtcgctcgttgtcccgtcggcatttttaccggcgcggtggtccagccttctcagcatctccaaagcagtggtgatgatcttatgagacgcgcggcccttgatgtccgcgtaaaagccgatgccgcatgcatcatgttcaaattcaggtcggtaaagtccataatgttgattattcattgcttcacattccttccatcatcaggtcgagtccgaaaagtaagattattttaaattttaccctcttgtgatcctttcttacaatatatagttaagatgaaattaatctcaaattaagaatggtgtgattcgcatggagttaagacagttaatttattttattgaagtcgccaaaagggagcatgtgacacacgctgcagatgagctgcatgtcgcccaatccgccatcagccggcaaatttcccttttggaagccgaacttggcgtttcccttttttggcgtgaaggaaggaatgtcaggctgacgccgatcggaagagtttttttagaacacgctgaaaaagtcgtgctcgaaattgataaagccaagcaaagaatgcaggaattcctcgatccggataacgggacggtccgcctcggtttttcgaccgggttatcggtccagaccttttcttccctgttggcacagtttcgcgaaaaacatcccggcctcgagtaccagtttgtgcaagggacccccggctatttgatccggttgattgaaaacggggaacttgagctggcgcttgcctctcctgtgccggatgaccatcccggggttagcggtgaaattttatacatggaaaagctcatgctgctcttccgccgcgaccacccgctttccgggcaggaaatgatccggctcgcccagctgaaaaacgaacgtttcattacatttcgggagggcttttcgattcgtgaaattctgttctccgcctgccggaagtccggttttgagcctgcgattgcatttgaaggcgaggacatggagacgattaaaggccttgttgcaagcggaacgggtgttgcaattctgcctgagcctgcgctattatttaatctgtctgaagaaatcgtaaaagcggaaatcagcgatgtagaactgatgcgcccggtcggcgtgatgatcccgaaaaaaagggaaatggcggcttcagaaaaagccctttatgcatttttaacatcattttatgacaggctgaaccggttccaaagataagccagcggagcgccgcgcaatccgaatcggttccgcaacaagggacagccgcgtttctgtaaaccgggcttcaggcaggcgtggaaaatgccgcattccagggtgataaggagcaggatgcatcgcggctttttgaaaaagggagagcgttgcaaaaatcataaagaaaacggagaaggtggaatcattggcaaataaggtggcacttgtaaccggatcaagcaaggggctgggccgggcgattgcgctcgatcttgcaaagagcggctatgatctggtcatcaattatgcgcgcagccggcccaaagccgaagaagtggcagcagaaattgaaaagctggggcaaaaagcgcttctgatcaaagcaaatgtcggggacgtgaaaaaaataaaagaaatgttcgcgcaaatccgggatacatacggcaggcttgatgtgcttgtcaataatgccgcttcaggtgtcgagcgcccggcaatggagctggaagaacgccattgggactggacgatgaatattaacagcagggcgctcctgttttgtgcgcaggaagccgcaaaactgatggaagaaaacggcgggggaaaaattgtgagcctcagttcgctcggttcgatccgctatatcgaaaattatacggcggtcggtgtgtcgaaagcagcgcttgaagctttaacccgctatttggcagttgagttggcgccgagtatttgtgtgaatgcagtttcgggcggcgtattgaatacggatgcgctcaagtctttcccgaaccgcgaagcactactggaagacgcgcggaaacatacgccggcaggaagaatggttgaggtcgaggatatggtgaacgccgtgcgctttttaatttcagacgaggcgtttatgatccgcggccagacgatcattgtggacggcggccgctcgcttcttttaagttgagcacgccagctttgagttcctttattttccagtttttatgggaaggataaatcgttgcgcctctggttatattaatacccgtggaggtgataacgatggcaaacaacaacaacttcaataaagctgccaaaggaaattttggttctgaatttgccagcgaaacaaatgcgcaggaagtaagaaagcaaaatgcgaagtctgcttccggccaaggttctttcggttctgaattcgcaagcgaaacgagcgcacaggaagtaaaaaaacaaaaccagcaatctgaagcgaaaaaatcgcaaaacgccgggcaattcggccagcaataaccgatagaaagaggtttcccgaaccgggggcctcttttttcttttaaggctttcggagttcgacaaaagaagtcaaaggattttgcccttccatcgagaatatgtgtgaatgaaaagttcaattcatcctttagggggtaaaaaactttgatggaagaatttaatcggcttgtggcacagcaaatggacacgatggataggctgctgtttttgcaatcggaaatggagagatgcaacgaagtgaaaagcgaactgttgaagttgcaggaggaaacaatggcggaagatatccttgataaaatcggccggatgaataaagaattgcaggaaattgaaaaagtttttgaatcgcagacggttgaactgatccgggtttatcgcagttcaaaaatttgcacataaacaatcctatttcaaataggattgtttagttttaatcgcgttcagaaaccgttataatagatagaaaacagatcgtttgattacataagtttcattccggcacataacgggcacaggtttacatataaacaatcatgaaagtgggcatgagatgatgggaatcccggcagaaggtgataaaatccaaatccaaagttataagcataacggccatattcaccggatatgggaagaaacaaccgttttgaagggcacaaaaagcctggtgatcgggggaaacgaccggactttggtaaccgaatcggacggaaggacatggattacgagagaacctgcaatctgctactttcatgccgaccactggttcaatgttatcggcatgatccgtgaagacggcgtctactactactgcaacttggggtcgccgtttgtttatgacggtgaagcgttaaaatatattgattatgatctcgacatcaaagtctatccggatatgacgtttacgctgctggatgaggatgaatatgaataccatcgcaaaaaaatgggctatcccgatgtcatcgaccatattttaaagcggaacgtggacattctcatccactggatccggcagcggaagggcccgttcagctccgactttattgatatttggtacgaacgctatctgacctatttgcgttaagcaaaccgcctgttgaacgccaacaggttttttgtatgcgtaaattttgaaaaaagatggaaataaatggtacgttttgtttgctcaggaggtttaatgcatgggtagtgtgaaaagatacatgaaatttgtaaagccgtattggtttcaaatcgttgcgacgatcatcatcgggatcatcaagtttgcgatcccgcttttaatcccgcttttgattaaatatgtgatcgatgatattatcggcaaccacgggctttcaccggatgagaagttacataagcttgtttgggtgatgtcggccatgcttgccatttttgtcatcgtccggccgcccgttgaatattaccggcaatattttgcgcagtggacggcaagcaaaatcttgtatgatatccgcggccgcttttttacccatcttcaaaaattaagtttccggttttatgccaatacacgcggaggggaagtcatttcccgggtgattaatgatgtcgagcagacgaaagattttgtcattaccgggctgatgaacgtctggctcgacatgacaacggtcgtgattgcaattgtcatgatgtttatgatggatgcccggctgactttgatttcactcgccgtatttccggtttatattttttcggtcaaatattttttcggcaatttgcgttttttgacgagaaaacggtcgcaggcgctggcggaggtgcagggctatctccatgagcgggtgcaaggcatggcggttattaagagttttgccattgaagaccatgagcaaaagcagtttgacaagcataaccgcaattttctggaaaaagcgctggcacacacgagctggacggctaaatcgtttgcggttgtgaacaccattaccgatattgcgccgctgttaattatttttgtttccggctatctcgtaattaaaggcagccttaccgtcggcacgctcgcggcgtttatcgcttatattgataatttgtacagcccgctcagaaggctcgtcaactccggcacgacgctgacgcaggcattcgcttcaatggaccgggtgtttgaactgctggatgaaaaatatgacattgatgaccggccgggcgcggtagagtgccggaatgtacgcggaaatatccggtttgatggcgtcgaatttcggtatgatgatgaaaaagagccggtgttaaaaaatatcaatcttgagatcagggcaggggagacggttgcctttgtcgggatgagcgggggcggcaagtcttcccttgtgagcctcatcccccggttttatgatgtgacaaaaggggtggtttacctggacggtcaggatatccgcacgtttaaagtacaaagcctgcgcgataaaatcggaatggtgctgcaggacaatattttgttcagtgattcggtgaaatccaatattttgctcgggaatccgcaggcgacggacgaggaagtcgtacaggcggcaaaagcggcgaacgcccacggctttattctgaatcttcccgacgggtatgaaacaacggtgggcgagcgaggcgttaaactgtccggggggcagaagcagcggattgcgattgcgcgcgtatttctgaaaaacccgccgattctcattctcgacgaagcgacatccgcgcttgatttagaaagcgagcatctgatccaggaagccattgaaaaactggcgcgcaaccggacaactttaatcgttgcccaccggctgtccaccatcacccacgcagaccgcattgtcttaattgaaaacggggagatcaaagaaaccggcacccacgaacaattaatggaaaaacaagggctctattacaacctattccaaatccaacaactggatgattagaaaagcggagggcgcttgcccgtcggcgtatgaatttcatagtccccgaactgagataaaggaaacacgatgagccgcaggcgaatcgatgcccgcttatcgtaggggaggggactggaaattcactagccgacagcgcccggagctggacaaggaaaagcggagggcgcttgcccgtcggcgtatgaatttcatagtccccaaactgagataacgtgaaacttcaaacagcggagggccagcctccgctgtttgttagttgaactaatcggacatttacgggcagttgaccctctagcttattgggttgtattttctgtatgtcctttggcgggggtcttgctgcccgttaatgtgggataaaggaaacacgatgagccgcaggcgaatcgatgcccgcttatcgtaggggaggggactggaaattcactagccgacagcgcccggagctggacaaagaaaagcggagggcgcttgcccgtcggagggatcccgtttcaacgacggggtctccggtttttttgtcaggaaatgaaacaaaatttcctttataaatataataatgaggtaattgcgatgttnnnnnnnnnnnnnnnnnnnnnnnnnnnnnnnnnnnnnnnnnnnnnnnnnnnnnnnnnnnnnnnnnnnnnnnnnnnnnnnnnnnnnnnnnnnnnnnnnnnntaacatcgcaaaaagctcaataataaaaatatgttgaaatattgtttcaagatgcatataatagtatgaaaggagggatgcatgattgcttggattttcaatatacttgaatgaagactggtcagaagggaaggaagcctgcattcgccaaatggcagcaattggaatggaaggaatttttacatccctgcagcttccggaagatgacccgtcccaataccggaaaaggcttgctccgctcttagaggctgcaaaacggaacaagatgaaagtcatgatcgatgtctccggaaacgtgctccgccatatcgggctgtccattgatgatcctgtacgcattattgaaagcggtatcaatggcttgcgcatcgatgccggggccagctgggaacaggttgcccgcctgtcgaacacgatgacggtcggattaaacgctagcacattaacggaacaggattatgagcagctgaaacaacatggcgctgatttcagccggctggaggcctggcataattattatccgaggcccggaaccggactggatgaaaattggttttacgaaaaaaacaaatggctgaaaagcaaaggattcagcattacggcatttgcacccggcgatggaaaactaagatttcctttatatgaatccctgccgacattggaaatccaccgccatcaaaatccgctggcagccatctgctcgctgttaagggattatgcggttgaccatgcttatatcggggatccggagttaacgccgcaatcccgcagccagatcagggaatttttttgccatgataccatactgcttcatgcaacggctgcagggccgaaatggcgcccgtatatattcaaaacccaccggaaccggctggatgtggcaaaggacgccatccgcagcgagcagtcgagaacatgcaaccaaaaggacgatatcgggcctgaaaacaacattccctgccacaaagggagtattacgctcgacaacaacctgtacgcaagatacaaaggggaattgcaaatcacaaagcggagcctgcctgccgataaaaaagtaaacgttatcgggcagattgccggccgcgacttgccgctccttgattttatcggttcgggtacacggtttaaaatgacggacaatgaaggtgaaaacgaatggacttagaaaaactcgccacagaacagcgcaacgaaaaaacaatggatcttgatacgttgtcaacaagggaaattttgcaattgatgaacgaggaagaccaaacggttccaatccgtgttgggaaggaactggcacaaatcgaaaaagcggtaaaagctgttatccgttcttttaaccagggtggacgtttgatctattgcggagcaggtacaagcggtcggctcggtgttctcgatgctgtcgaatgtgtaccgacattcagtgcggacccttccatggtgcaggggctgatcgcaggcggcagtgcggcaatgatggttgctgttgaaggggcggaagattcgaaagagatgggggaagaagatttaaggcgcatccatttatcggaaaaggatacagtagtcggtattgcggcaagcggcagaacaccgtatgtgattggcgcgctggactacgcgaaaaaaaccggtgctgtggcggcgtcgctttcctgcaacaaaaatgctgaaatcagccgccatgccgatattccgatcgaagtggaaaccgggcctgaagtgttggcgggatcaacccggctaaaagcaggcaccgcccagaaactcgtattgaatatgatttcaactgcttcaatggtcggaattggaaaagtatacgggaatttaatggtggatgtaaagccgacaaacgcaaaactggtggagagatcgaaatcgattattatgcaggcttccggatgcagctatgaagcagctgaacaggctttttacgcagccgacaaaaatgtgaagctggccattgtaatgttgttaaccaatctttccaaggaagaggcagaggagaaaatggcacaggcaaatggttttattagaaaaatcgtttaaaccgggggatgaaaaaaatgaccgaaacgaaagaacaaagactggcaagggaaatttacgaaaatgtcggcggcatgggaaacgtcgaaaagatcatccattgcatgacaagagtccggcttaccattgcggattacagcaaagtcaatatcgaaggtctgaaagcggttgatggcgtgctcggcgtcgtggaggatgaaacgctccaggtcgtgcttggccctggtatcgtcaacaaagtcgccaaccttatggtacagcaggccggtgtaaaacttggggaaaattttccgaaggctacgggccatcaagatgccgggcggtcaaaccgcgaaatggtggaagccaaagcggccgaagtaaaggcaagggaaaaggcgaaacataaaagtaacggtttcaaaagggctttaaaatcgatttccaatatatttgtaccgcttattccggcttttgtcggcgccgggattatcggcggggttgccgccattttccaaaatatcatggctgcggactcctcagccctcagccagaactgggtgtccgttattacgacattaaacattattaaaaacggattgtatctctatttggtcatttatgtcgggatcaatagcgcaaatgagttcggggcgacaccgggccttggcggggtcatcggggctgtgacgatgctgaccggcatggatccgaaaaatccgcttccaaatatttttaccggagatgccctttcccctttacaaggcgggatcatcggtgttatttttgcagtatggattttagcgcttgttgaaaaaaggctgcataaaattgttccaaatgctgtggatatcattgtgacgccaacgattgcattattagttgtcggactttttactatttttattgtcatgccggtcgcaggcacggtatcaggcgctcttgtcgggtcgatcacgtgggtgttgaaagtcggcggcgctttttcaggatttatactggggcttgtcttcctgccgatggttatgttcggcctgcaccagattctcaccccgatccatattgaaatgatcaataagacagggatgaccccgctgttgccgatccttgccatggcaggcgcagggcaggttggcgcggcgattgctttatggatcaggtgccggaaaaataaaaaacttgtgcagctgattaaaggggcattgccggttggtattatgggcattggcgaaccgttaatttacggtgtgactttgccgcttgggcgcccgtttattaccgcgtgcatcggcggcggcatcggcggggcagtgattgcaggcatcggcaatatcggcgcgattgcgatcggcacaagcgggattgatttaattccgctgattgcgcacgggcgctggctcggttatatcgcaggcttggttgccggctatattggcggcttcgttgccacctatttcttcggcgtcccgaaagatgccatgaaggcgacaaacgcagatcgtgagtgatggaattggaagaaaatattattttgcagattaaatccaaattaagcagtctgtcaaaatcagaaaaaaagctcgggaagtatattctcagccacgctgtggaaacggtcaatgacaatacgagcgagcttgcgaaaaaagcaggcgtcagcccggccaccgttgtccgcttttgccggtcgatcgggctttccggcttttcacaattaaaaatcagattgtacgcggatgcatccgggctggatcgggaaatttatacggatatcacatcaaatgaagatattgcaatgattgctgataaactggctttgcggtttaaccagtccatcacacaaactgcaaatcttctcgagaccggctgcattgaaaagataacggccatggtggataaaagcccggctatatacgtatacggaatcggcgcctcccatgtagcggctgaagacttcatgcataagttttcaagaatcggcaagccggtggtccacacgctggatcaccatctgcttggttcttcattgatcaacgcctccaaagactctatgtttgtggccatttcaaattctggcgaaaccaatgaagtcatcaaactgacgcagattgccaaacagaacgggctttttacagcgggcatcacacaaaaacgggacagtacgcttgcccgtatcgtggatgtgcctttgatccaccatggcggggaagcggtcctgctgagaagcgcggcaaccacatcccttgcagcacaactgttcacgattgatgttttgtacttcgcctatgttgcgcggcattatgaggaaatcatgcatcgcttaaaaaactcaaaaatcaatatccagacctttttccgcaaagaaaacaactaaaagccggcccttaagcccggcgtgaaaagcgcagcaaacaaagcggccgttttggaaacggaaaatctttgctaaaaagcgaaaacagagtagcgccggcccgtatgggaacagggcggtgcatccaataggggacggcaggccatcaagattgagttctgattgttcgtggtgataggtttgggacacggtgatcaatttttccagatgttcaagctcttcctggtaatccacaagcagtgccagcaggttcatcacgtggtaagactggagatcggtgcggaaagtctcatcttttaagttctgcagaaaaatgtccatcagctcattccgctgtttgtcggccgtatcgcatttttgcgcatgggctttgacctttccaagaaacatgagcagcattttttcatgttcgttcacaagatattccatttgttcctggagcatgctccggaacgtttccggcagcccggcaatatccgccttgtactgctgcagccgttttaaaataatatagcttaaattcaaaatggccaccatttctttatacagtaccactttccgctgccgctcgatcctgttgcttttcccgtaaattttttcctctttaaataaagtgtacagctgctccactttgtacacccgctctttaatgccgggaagttcttcttttaaaagctggtaatcggcttcctggcgcgccgcaatccggatgaatttgagcagttcttctgtcacatgggtgaggcggacatacagtcgcgcctcgtatttcggcggcagaaaaatcaaattcacaagaaacgagctgaaaatcccgataaacaatgtcgcaaaacggatcccagccgtctgcagaaaattgtcacttggcgtttccataatgacaatcatggtcacgagcgcaaggccgaccgtatcatcgagcttcagtttcaacattaaaatgatgatcagcacggacccgaggccgacgacgagaaaatggttgccgaaggccatgacaaaaatgacggcgagcaaagcgccgatcagattgccctggacctgatcgataatggaccggtaagaccggtatattgtaggtttaatcgcaaaagtggcagcgatcccggcaaacaccggggacggcatttttaataattgcgcgataaacagcgcgatagtaatagcaattcctgttttgacaatgcgggctccaaccctcatattggcaattcctttcttccttgcaaagatatttaaatgatatgttccaaaaggctgcattaaactatttccgtccgaaaatttttttaaacggcaaacctttgattttgtcattataacatgtttgccggaagacgtgtggggatgcggccggagaatttgtcctatttttgcccggcacggaatatacatggagtaaatgaatccaaaatgcgcgtatgaagaggggaaacaatttgtggctgattgaaaaacatgtgcttagcatggctgcgctcaggctgatctcaggaatgatcgaaatttccgcggccattttgatgctcaaatacaatcaagtggaaaaggcgctcgtcatcaacagttctcttgctattgtcgggcctgttgttttaattacgacaacggcgatcggggtgatcggcatttccgataaaatctcgtttgccaaaatgctgtggattctggccggggtaggctgcattttgtacgggatcaaaagcaacgggtaagctttgagccnnnnnnnnnnnnnnnnnnnnnnnnnnnnnnnnnnnnnnnnnnnnnnnnnnnnnnnnnnnnnnnnnnnnnnnnnnnnnnnnnnnnnnnnnnnnnnnnnnnntaagtgtctaaatttttccactttggtcggttttgggcgggtttcaatagattaagctactcattcctgtggtaaatattgtaaaacggaaaaggatgattttttttgaaaaaaaaagagccatgaaagccactcctttgttaagatataagtacgaccaaatatccagggagtgatttcatgactatttctattctaacacaaaccagagacttttcaatacaacaaagagttataaaaagtttcccatatctattacggtattagttaaaattacactgtcccatttctgggacagtgtaatttttaaagaaggtgattatccttttaaatgtgaaaaagcatggtcaacggctttgattgtttctgcgatatcttcttccgtatgcgcggttgtgaggaaccaggcttcatattttgacggggcaaggttaatgccttgctcgagcatcagtttgaaaaatttcccgaacaactcgccgtcggatgcttcagcctgcttgtagttttcgactttttcgcccgtaaagtaaacggtaaaggcgccgactacgcggttaatggtaatggtgacgccgtgtttttcagctgcttccaaaatgcctttttcaagcatggcaccgagacggtcgaggttttcatacacgcccttttcctggagcacttcaaggcaggcaattccggcaagcatcgaagccgggtttccggccatggttccggcctggtaagcagggccgagcggtgcgacttcttccataatgtctttgcggccgccgtatgccccgatcggcagtccgccgccgatgattttgcccatggcggttaaatccggggtaacgccgagcatgttttgcgcgccgccgtacataaaacggaaagcggtgatcacttcgtcgtaaatgacaagggcaccggctttgtgcgccagttcattaatggcttccaaaaatcccggtttcggcggcacaatgccaaagttgccgacaatcggttcaaccagtacggcggcaacttcatcgccccatttttcgagtgcctgtttaaaaggttccacatcattataagggacggtgatgacttcgtttgcgatggcttttgttacgccggctgagtccggcatgccgagctgcgacgggcctgaacccgctgcgacaagcacgaggtcagaatgtccgtggtaacagccttcgaatttaatgattttgtcgcggcccgtgtaggcgcgggcaacgcggatcgttgtcatgaccgcctctgttcccgagttgacaaagcggactttgtccagggacgggatcgcttctttcagcatttttgcgaattgcacttcatacggggtcggcgtgccgaacaaaacgccgttgtcggctgcttttttaatggcagcagcaatatgcggatgggcaaagccggtaatgattgggccgtatgccgccagataatcaatgtagcggttgccgtccacgtcataaaagtacgcgccttttcccctttccatggcaactggggctccgccgcccaccgccttatacgagcgggacgggctgtttacgccgccgacaatatgctcaagtgcttctttatacaagctttcagattttgaaaaatccatttatcgttccctccttattggcattggccaattccaccattctattgtagccttccattttcttcccgtaaagactgtcataagccgggcggcgggggcatacaatggaaggacaaacttgaaagacgccgggggtatcgggcatgttttattttctcggcatattggttgtcctttgtattgtgatgagcctgcgcactttgttttatccggcatcctggcgcgcgaagcagctttcatttgaacgttttctctttcttgcttttacgtacaccaatatcatgatcgggttcgggttgttgtttttactgctcgatatgatgggattccaaattgcgctccatcacggaaagctgttggaagggcatgatttccgcacactgcttgattatatgtatttgagtgccgtcacgctgttttcggtcgggtacggggatattgttccgatcggggccgcacgggttcttattatcattgaagcgttaatcggctataccatcccggcggcgtttgtggtaagatccgcttttgactcggaaaaaaaatagcctggcagggggattcccgcatgccggccgttgtccaccagggaagatcaaaatgcggccggcgcctatttttgtatccggggcggcttttgtccacgcggatttgccgcgggttcatagtgtatattacctcctcaaaaaaataacgatatctttgaaccgacttgttcggtttctttttttatggcaattttttcgaattcgtgatacaaaactaatatatggttttacagggaatccctttaaagtgcagattgaaaaaatagcgcggcggcgtttatataggctgatccatcaaattgatgcggaggggacaagatgagaatttatacaaggtccggtgataaagggacgacatcgctcgtttacggggtaagagcagcgaaaaacgacccacgtgttgaagcttacggaacagtggatgaggcgaactcggcgatcggcgttgcgctcagttttttgcacggcgaacaatttccggaaaaagaagaattggaacaatgtttcagcagggtccagacgatgctgttccatgccggtgcggagctttccacgccccagggaaaagaagtgcactggaaattgaaacaggcttatgtcgatgaacttgaggctttgattgataaatgggatggaaaactggaaccgttaaaaacctttattttgccgggcgggcatccggcagcagcggcgatgcatgcggcgcgcacagttgcaagaagggcggagcgggcaagtgttgcggtcgatggcgtaaatccgcttgtgctgtcgtttttaaaccggttgtccgatttcctgttcgttgcggcaagatatatcaatcactgccttggggtgaaagaccacccgctccagccgcttaaggaatagccggggtattgcttttacatactcccggctgaaaaaaggcatcctaatgaacgaatttccttttttttgagcctgaagagcgtgggaatgggaaattcccggcgcattgagttgctaatttgtttgacaaaacaggggtttattttgtaaactttttataaagattataaattaagaatgataattgttagaaaagaggtgcatggcggtgtccgagcaacagttgaataaagcactggagaccttgaaacagtcgggcgttcgtattacccctcaacgtcatgcgatattggaatatttaattgagtccatgtcacatccaaccgccgatgaaatatataaggctcttgagggaaaattcccgaatatgagtgtggccaccgtttacaataacttgcgcgtttttaaggaaatcggattggtaaaggaactgacttacggagatgcatcaagccgctttgattttgtcacatcaaaccattaccatattatttgtgaagactgcggaaagattgtcgactttcactatccgggcctggatgaagtggaacagcttgccgcgcatgtgaccggttttaaagtaagccaccaccgtatggaaatttacggtacctgtccggaatgtatgaaaaagcacagttatctggaagcaaaataaaacgcagacgccggcgaaacgggttcgtccggttctttttttgcggctttaacccagaccctgatacaccgaaaggattttttaaaagttttagcagtgcaactttatacacttctatgcaatcaatccggctcccctttcgttgggggggcggatttttcattgtatttatgcaaccgcctacatttttagaaatgaaagtgtgatgaatttcacaccccgcgtgtgggcttttccacagtctgctctggcgcaggacggtatgatcaagatgtacagaagatatccttcatgaaggaaatttaatcatatgtaccggaaggagccatgaaaaatgaaaccgttatccaatacagccgccgtaaagccaaaaacaaagatgaagtacccgcttcacattacgtcggaaatcggcgagttaaagaccgcgcgaaggaatttatttgttgctggatggttatatcaaaattgacaaaatggacgaaaacgccgcttctttttacggcgattacattaagccgtacgaactttttccgtacggcggcttgtttaaagatgaaaattatcattatactgcatacgctgtcacggatatcgaactgttttatattccgacggcagtatttgaaaaaatcgccaaatcaaataacacgttgctgctccatattattgagcatctctccgatattttaatcctgcatgaatcgaggctgcagcttgtgacaaacagcaatgcttccgagcgggtccgccacgtgctttgcctgctccttgaagatctcgggataaaggatcatggcaaaatccggattctttgccccgttaccgtcgcggatattgccaagcttgccggaacatcaagggaaaccgcaagccatgttctgaatgacttcaaacgaaatggcaccatttcgtttgagaagcagaccattaccttccacaaaccggatatgttccgcctgcatcgattgtaaactgcacccctccatctaagggggaaaggcgcttttcaacaatccgttaaaattctgctgccacctggccggaaatgcttaagaaattggcaagggccgggttttggtcctccttccggtacgcaatggacaaaacggcatttaacgggtgcccttcaatctccctgtacacaatatcgagattaaataatttttcggctgtccgtggcagcaccccgattccgattccggctgtaacaaggccgacgaccatttggtactcggttgcttcctggacgattttcgggctgaaatcggcatctttgaaaagagacaggaattcatcataaaggcccggccaaatatcgcgcgacacaacgacaaacgggacgtccgccagatcctcgatgcggattttttctttttgggcgagcggatggcttttcggcatggaaagggcagccgcgcctgtctggatttcagctgtttcaattaagggatcatggatcggcggatggagcaggccgacatcgatttctttccggtgcagcgcccgaatctggtccggggttgacaactcatggagggaaacggccgtttttggatatttcagccggaattcccggacgatggccggcaaaatgtcataggtcgccgagccgacaaagccgaccaccacattcccgaattccccccgttcagcccgctgtgcattttccaccgccctgtccagctgctcaagcacctgcttggcttcttttaaaaaaacttttcccgggatcgtcagttcaacatggcgtttattgcggataaacaggtccaccccgatttcttcttccagctgccggatttgctgggaaagcggcggctgggtcatttgcagccgctctgccgcttttccgaaatgcagttcttccgcgactgttaaaaaataatgaagatggcgcagttccatctgtatttcctcctttccatcacgattaatatttaaaatatattatttatagcacaataatatattttaaacatttccccgtgtggtgtaaagtatagatagaaacaagttggctcagcctatagatgaacgttttcccctgtaacaaacgggggaaggttcaaaatagggctgtccttgggagtgggaactgtggaaaaaaagaattcaaatccaaccaatacaacggaaaaaacagctgcagacctggttgtcgactgccttgagaagcaggaagtgccatacgttttcggcatcccgggcgcaaaaattgatgccgtatttgatgtactgaaagaacgcggcccggaattgattgtatgccgccatgaacaaaatgccgcttttatggctgctgcaatcgggcgtttaacaggaaaaccgggtgtctgcctggtaacgagcgggccgggggcttccaaccttgccaccgggcttgccactgcgaatacggagtgcgatcctgtcgttgcgatcgcaggaaacgtgccgcgcgcagacaggctgaaaaaaacgcaccagtcgatggacaatgtatccctgttccagccgattacaaaatacgcagcggaagttgtccacccggatacagtaccggaagtgatgacaaatgcatttcgttctgccgcttcggcacaggcaggggctgcttttatcagcttcccgcaggacgtgctgaaggagccggcgtctgtcaaagctttgggcccgcttaaaagcccgaaactcgggaaagcaaatgaagaagctgtaaaagaagctgtaaaagcgatccagcatgccaaattgccggtcattctggtcgggatgcgtgcaagccgcccggaagttgtgaaggcggtccggtcactcctgaaaaaaattgcattgccggttgttgaaacatttcaggcggcaggtttgatttcaagagatttggaagaccgtttcttcggccgcatcggcttgttccgcaaccagccgggcgatattttgcttgagcatgcggatgtcgtcctcgcgatcggttacgattctgttgagtatgatccgaagttttggaacagcgaaggggaaagaaaaatcatccatctcgatgaaatccgcgccgatatcgaccatgattaccagccggaaatcgaacttgtcggcgacatttcagcgagcgttgatagcatcaaagaacagctggcccgtttaaatatgaacggcaagtccatggaacttttggaacgcttgcgcaaccagctgaatttgcgcgacgaaccatcggaaaaggcggataaaaatcttgttcacccgctccagttcattcacgatttgcgttcgttgattgatgaccatgtgaccgtaacatgcgatgtcggttcccattatatttggatggcgcgccatttcagggtatatgaaccgaaccgcctgctgttttcaaatggcatgcagacgctcggggttgcgcttccgtgggcgattgccgcaacgcttgtcaatccgggtgaaaaagtcgtatccatctcaggggatggcggcttcctgttctccgccatggaacttgaaacggccgtccgtttaaaatcgccgcttgtgcatatcgtctggcgtgacggcacgtacgacatggtggcgttccagcagcaaatgaaatacgggcgcacatcgggagcggacttcggccctgttgatattgtaaaacacgcggaaagttacggcgcaaagggcttgcgggtgaattcaccggatgaactggtttccgtgctgaaggaagcactggactcggaaggccctgtcgtggtcgatgtcccggttgattacagcgacaacctggaactggcgaaaaaattgctgccaaaccaattggtataatcacttgctgcggcggatctgccacgaccggacctcgccggcaagaattttcaggatacagatagaaagaaggggtttaccatgcgtactgctgcagaaaatcaaaatgcagagcaaatttcaacaagccggaccgatgaagtataccaattgtccacaatgacatcacttcttgacggcgtatacgaaagcgacaagacgtttgctgaattgaaaaagttcggcgatttcggcatcggcactttcaaccatttagacggggaattgattgcgtttgacaatgcattttatcagctgaaggacgggacggcaaaacgcgtacagcctgaagacaagtcaccgttttgctcgcttgcacatttttcggaggatatcacctatacaactgaaggcccccttgcaaaaccggaactggaagacttgatcaaagacctcgtccgcagcgaaaatttattttatgccattcgtgtggacggtgtttttaaaaaaatgaacacaagaaccgtctcctaccaggaaaaaccagtccccatgacagaagcggtgaaatcccagccggtttactcgtttgaaaatacaaagggaacgcttgccggtttttggacgccgatgtttgcgcaaggaatcgcggtcgccggcttccacctccattttattgacgacaaacgcaccggcggcggccatgtctttgactatgtgcttgactacgggacaatccggatcagcaaaaaagcgcatatgcatctggaacttccggaaacagacgcttttttaaatgcgaacctttcccgcgccaatctggcagaagaactggaaaagacagaaggctgaacaaaggcgaagacggcccgcatccggcgaaaaccggatgcgggtttcttcaaatggggcgggtctttcctgaatatgcctgggttttttctacccggccttttcagctgctaatccggcctgtcacttctgcaaccgcttacggttgtatgattcgtcaaacgcttttccctcaagctcgggatccagtgtcagcggctcattgcaatgcatgcaaatatccacccgtcccagcatttttgtcggcttgtcgcagcccgggcatataacctgcactgcttttgtcgagagcatgccgatccagaaataaaccactgtgctcaataaaataaagaacaggccgaacagcataaaaagggtcacaacaaccggatgtgttcggaaaaacagcccggtatacatgacaataaatccggcaaaaatcaagcttaaggcaaatgtccgaattttattgattttgcttgaatacttcgccaacgccattccccctttctttttaatatagtatgtgtaaaattttnnnnnnnnnnnnnnnnnnnnnnnnnnnnnnnnnnnnnnnnnnnnnnnnnnnnnnnnnnnnnnnnnnnnnnnnnnnnnnnnnnnnnnnnnnnnnnnnnnnntttccgaaaattacaccgagcaagtaaagcacggtagccgaaagtgtacaaaaagagtgtcttggaatacccgatatttaaaccttgtcgagaaaaacttgacacatactttaatataacataactggcgaaaaaagaaggaatgcaatatactgaaatttgttgcgaaaatttgcaggggattccccgggatttgcagaaatacgttcagaaatacgttcatagaaagcatgatggaggaatgatgcatgagagacattttaaggccgatttaccaggaaagggcaagccttccgaataccctttccgtcctgtatattgaaaaaaagccggatgaagatgctgcaaccaatttgttcgacgccattctcttcatcattgtcaaagagcaggaccagccgctctacgtcaagcattatcgctatgaagacaaaaaagccgccttatatgtcgtggcagaggaccagttgaaagagtggatgctgtacgggacaaacaacaatattttcgaatggattacagaagggctgatcttatttgaccggaatgagtacatggcacgcttaaaagatgaagtaagggattttccgtttcatgaacgaaaggtcaaaatcggaacggaatttgccaaattgatccgccggtatttaaacggaaaagacttcttcaaacagcgccagtacctcgatgcctataaccacatcatccacgccttgcaccatctcgccaggctcgcggtaatcgaaaacggttttcacccggaaataaccgtctggaaccaggtaaagcaaattgatctgcaaatctttaagttgtacgaagaactggtaacaagtgaagagtcgctggaaaaacgcctggaactgctctttcttgcgagtgaattccatatttattcgaagataccgtttggcgcccagcatttactggaactgatggaagaacgggaagaatggacaattgatgaactgcttttccaccccggccttcaatcgtacagtattgatttgcctgttctgcttgaatttttaattgaaaaaaatatgattgaagaaattacagtgccgacaaaagggcctggaatcttccataggcggtaccgggttccaaaaaaacaataaaaaaatatcaaatttagtattgacgtataataaataacttggtatagttatatacgtcgctgatgaacttgaaagaccaacgacgaaaggtaaaaaaagttattgacaaaggcttcattattatggtaaaataatttagtcgctgttaaaacagattgttccttgaaaactggacaaaacgaaacgtcaaattctttttgagcttttatcaaacatctttactgagagtttgatcctggctcaggacgaacgctggcggcgtgcctaatacatgcaagtcgtgcggaccttttaaaagcttgcttttaaaaggttagcggcggacgggtgagtaacacgtgggcaacctgcctgtaagactgggataacgccgggaaaccggggctaataccagatagttttttcctccgcatggannnnnnnnnnnnnnnnnnnnnnnnnnnnnnnnnnnnnnnnnnnnnnnnnnnnnnnnnnnnnnnnnnnnnnnnnnnnnnnnnnnnnnnnnnnnnnnnnnnnaaaccaagtaaaccgagaatcgcttatttttggatttaaaccttttatggttaagttagaaagggcgcacggcggatgccttggcactaggagccgatgaaggacggtacaaacaccgatatgctccggggagctgtacgtaagctttgatccggagatttccgaatggggaaaccccctgtctttaatcggacaggattcctgcctgaatccatagggcaggaagggcacacccggggaactgaaacatctcagtacccggaggaagagaaagcaattgcgatttcccaagtagcggcgagcgaacaggaaacagcccaaaccggaaggcttgccttccggggttgtaggacactcatatgggagttacaaaagaacggggtaagtgaagcggcctggaaaggcctgccggagaaggtaaaagccctgtaactgaaacttcgttctctcccgagtggatcctgagtacggcgggacacgaggaatcccgccggaatccgggaggaccatctcccaaggctaaatactccctagtgaccgatagtgaaccagtaccgtgagggaaaggtgaaaagcaccccgggaggggagtgaaagagatcctgaaaccgtgtgcctacaagtagtcagagcccgttaacgggtgatggcgtgccttttgtagaatgaaccggcgagttacggtctcatgcaaggttaagctgaagaagcggagccgcagcgaaagcgagtctgaacagggcgaaagagtatgaggccgcagacccgaaaccaggtgatctacccatgtccagggtgaaggcaaggtaacacttgctggaggcccgaacccacgcacgttgaaaagtgcggggatgaggtgtgggtagcggagaaattccaatcgaacttggagatagctggttctctccgaaatagctttagggctagcctcaagcggagagttttggaggtagagcactgtttggacgaggggccctcatcgggttaccgaattcagacaaactccgaatgccaaaaacttatgcttgggagtcagactgtgagtgataagatccatggtcgaaagggaaacagcccagaccgccagctaaggtcccaaagtatacgttaagtggaaaaggatgtggcgttgcttagacaaccaggatgttggcttagaagcagccatcattcaaagagtgcgtaatagctcactggtcgagtgacgctgcgccgaaaatgtaccggggctaaacgtatcaccgaagctgcggatggacaccgtttggtgtccgtggtaggagagcgttctaagggcgttgaagccggaccggaaggaccggtggagcgcttagaagtgagaatgccggtatgagtagcgaaagaagggtgagaatcccttccaccgaatgcctaaggtttcctgaggaaggctcgtccgctcagggttagtcggggcctaagccgaggccgaaaggcgtaggcgatggacaacaggttgatattcctgtaccgcctcttcaccgtttgaacgatggggggacgcaggaggatagggcaagcgcgacactggttgatcgcgtccaagcagttaggccggtgcggaggcaaatccttcgcgccaaggcggagctgtgatggcgagggaaattaaagtaccgaagttcctgattccacactgccaagaaaagcctctagtgaggtgaaaggcgcccgtaccgcaaaccgacacaggtaggcgaggagagaatcctaaggtgagcgagagaactctcgttaaggaactcggcaaaatgaccccgtaacttcgggagaaggggtgctttttggggtgtatgccccgggaagccgcagtgaataggcccaggcgactgtttagcaaaaacacaggtctctgcgaagccgcaaggcgaagtataggggctgacacctgcccggtgctggaaggttaaggagaggggttagccgcaaggcgaagctctgaactgaagccccagtaaacggcggccgtaactataacggtcctaaggtagcgaaattccttgtcaggtaagttctgacccgcacgaaaggtgtaacgatctgggcactgtctcaacgagagactcggtgaaattatagtacctgtgaagatgcaggttacccgcgacaggacggaaagaccccatggagctttactgcagcctgatattgaattttggtacagcttgtacaggataggtaggagccttggaaaccggagcgccagcttcggcggaggcatcggtgggatactaccctggctgtattgaaattctaacccgcaccccttaccggggtgggagacagtgtcaggcaggcagtttgactggggcggtcgcctcctaaaaggtaacggaggcgcccaaaggttccctcagaatggttggaaatcattcgcagagtgtaaaggcataagggagcttgactgcgagacttacaagtcgggcagggacgaaagtcgggcttagtgatccggtggttccgcatggaagggccatcgctcaacggataaaagctaccctggggataacaggctgatctcccccaagagtccacatcgacggggaggtttggcacctcgatgtcggctcatcgcatcctggggctgtagtcggtcccaagggttgggctgttcgcccattaaagcggtacgcgagctgggttcagaacgtcgtgagacagttcggtccctatccgtcgcgggcgcaggaaatttgagaggagctgtccttagtacgagaggaccgggatggacgcaccgctggtgtaccagttgtcttgccaaaggcatcgctgggtagctatgtgcggaagggataagtgctgaaagcatctaagcatgaagcccccctcaagatgagatttcccacagtttaactggtaagatccctgaaagatgatcaggttgataggtccggggtggaagcgcggtgacgcgtgcagctgacggatactaatcgatcgaggacttaaccacgaaaagcgaaggtgccttgtttagccccgacaagcgaatgttctgaccggcatggagccgtcttttggctccgtggcgggcaggtgattcgacctcgaggggctaggcaccgaagctggacaattctcaaagttagactggtgtaccagttgtcttgccaaaggcatcgctgggtagctatgtgcggaagggataagtgctgaaagcatctaagcatgaagcccccctcaagatgagatttcccacagtttaactggtaagatccctgaaagatgatcaggttgataggtccggggtggaagcgcggtgacgcgtgcagctgacggatactaatcgatcgaggacttaaccacgaaaagcgaaggtgccttgtttagccccgacaagcgaatgttctgaccggcatgaagccgtcttttggctccgtggcggtcaggtgattcgacctcgaggggctaggcaccggagctggacaattctcaaagttagaagcagaaacgcattctccgtttacagttttttctcccatccggttttcagggaatcacataattcctgttgataagcaatgaaaagtttgttataatgatttttgtcattaaggtccggtggcgatggcggaaaggtcacacccgttcccatcccgaacacggaagttaagctttccagcgccgatggtagttgggggtctccccctgcgagagtaggacgctgccgggcttgtattccgcagtagctcagtggtagagcaatcggctgttaaccgatcggtcgtaggttcgaatcctacctgcggagccataatggagagctgtccgagaggccgaaggagcacgattggaaatcgtgtaggcggctaaaagctgtctcaagggttcgaatcccttgctctccgtcatgatccatatggcccgttggtcaagcggttaagacaccgccctttcacggcggtaacacgggttcgaatcccgtacgggtcatcattataactggaggattagctcagctgggagagcgtctgccttacaagcagagggtcggcggttcgatcccgtcatcctccaccattttatcatcgcggggtggagcagtctggtagctcgtcgggctcataacccgaaggtcgcaggttcaaatcctgctcccgcaatttacatataaaggtcccgtagtgtagcggttatcacgcctgcctgtcacgcaggagatcgcgggttcgattcccgtcgggaccgccatctgcattttacataatcgcggctcggtagctcagtcggtagagcaaaggactgaaaatccttgtgtcggcggttcgattccgtcccgagccaccattggccggtctagctcaattggtagagcaactgacttgtaatcagtaggttgggggttcaagtcctctggccggcaccacgcaatatggaggggtagcgaagtggctaaacgcggcggactgtaaatccgctccctcagggttcggcggttcgaatccgtccccctccatttttaaaggggcatagtttaaaggtagaacagaggtctccaaaacctccagtgtgggttcgattcctactgcccctgccattatgatggcggttgtggcgaagtggttaacgcaccggattgtggctccggcattcgtgggttcgattcccaccatccgccccatatttgattgggccatagccaagcggtaaggcaacggactttgactccgtcatgcgctggttcgaatccagctggcccagtatgcggaagtagttcagtggtagaacatcaccttgccaaggtgggggtcgcgggttcgaatcccgtcttccgctccattgatggcggcatagccaagaggtaaggcagaggtctgcaaaacctttatcaccggttcgattccggttgccgcctccatcatattgtgccggtgtggcggaattggcagacgcgcacgactcaaaatcgtgttccttcgggagtgtcggttcgaccccgaccaccggtatcaaaaaattttgttggaaaacttttggtgaaacgcttcttacattgtaagaagcgtttttttatctatttacatcagtatgggctattctcgtttgaaaattttgaaacagagcgctgtggatgttaaaatggttttgatacatttcaataggggggaatgtgacggttacaaaacatgataaaatggtgtgctgcgttatttcattcatcataccaatcattggcgtcattttgtttttcagctggatggggaacaaagatacagaaaaaagaaaactagggaggacctctttgtattttgcgcttgcatcttttctcatctttcttttcattggcgtgataaatttatattcgttttgagatcaatatatcttcataggttcctggtttgtccacatagaaaaagagtaccggaaacatggtttcaagtgtactgcaaaacgaaatttcgaggagatgggatggagtgaagatcagagctgctgtactgcgggaatcaggggctgctgtgccatatgcggcaagcaggccgattaaaattgaaacattggaactggatgagccgcaacaaggggaggtgcttatcaagatgaaggcggccagtttatgccattcggatttgtctgttgtaaatggcagcagaccccggcctttgccgatggcgcttgggcatgaggctgccggtgaagtggtgagaaccggtgaaggcgttacggatctggcacccggtgaccatgttgtgtgtgtgtttgtgccaagctgcggtgaatgcctgccgtgcaaagagggacgccctgcattatgtgaaacgggatcggcgtccaatacggcaggcactttaccggggggcggcatccggctccatgcaaatggcgaagatgtaaagcaccatctcggtgtatcggatttttctgaatatgctgtcgtgtcccgccgttcattgattaaggtggaagaagacattccgtttgaaaagcttgccctttttggatgcgccgtcattacaggtgtcggggcagttgtgaatacagcccggatcaagctgggcagcacggtggcggttgtcggtttgggcggcgtcggattaagcgctttaatcggggctgtatcggcaggggcgagccatgtcgtagcagtggacatcaatgaaaataaattcgcattggcaaaaaggttcggggcaacagatgtatttcattctaaagatccggatgttgttgagaaaatacgggaagcaaccggcggagggctggatactgtttttgagacggcaggtgcggtcccggcgatggaaacggcatacgcgattaccaagcgcggcggcacaacggttacgacagggctgccgcatccggagcatcatttttctttcccgtacgtaacgctgacggccgaggagcggacgctgaagggctcttatattggcagttgcgttccggaaagggatattcccaattatatccggctttttaaaaacggacgcttgccggtggatgaattggcaagtgatttcattactttggatgagataaatgaggggcttgataaactggccaaaggggattcatctagaattataatccgtttcgattaaaagatggttgccaaaaaacggcgcccatgccggcggtgccgttttttgcttgccgctttttaaacgggttgcgctcttgagatatgcggctgataaaaatctttcctccggcaaatattaaggtcgtcccatttctatggtagcaggaaaagtgcaaattgcttccggttggatatcgtctgttttacaatgtatgtatcttcccaaccgggtggagaaaggaagcttgcaatggaaaatcgtaacaacatacaagatattgctttttctattttagatttgattcctgttttagaaggaaagacaccggctgattcttttgaaaatacactggatcttgcacgccatgccgaagaatggggatataagcgctattggctggcggagcaccataatatgacaggtgtggccagttctgcgaccgctgttttagtcggttatgttgcatccggcacaaaaacgatccgtgtcgggtcaggcggggtcatgctgccgaaccatgcgccgcttgttgtggcggaacagttcgggacgctaggttctatttatccggacaggatcgacctcgggcttggccgggcgccggggacagatcagctgacagcggcagcactccggcgcaatcttaatggcagtgagctggactttccacacaatgtccaggaattgatgcagtattttcataaagctgaacaggaccgccgcacatatgcgagagccgtggttgcggaaggcgtcaacgttccggtctggctgctcgggtcaagcacatacagcgcatcacttgccgcacaactcgggctcccgtttgcatttgcaagccattttgcaccggcgcagctgtttgatgccctctatatttaccgcgaaaactttaaaccgtccgaatggttgaaagaaccgtacgccctgttatgcgtcaatgccgttttggcggacacggatgcagaagcagagcggattgcgaccagcttgtaccagtttttccttggcgttatccgcgggcggtcgcaaaagttgcagccggctgttgacagcatggagggtatttggacgccgtatgaggaagcagcggccatgcgccagcttgagtatgcattcatcggttcaaagcagacagtaaaagagaaaatggaagattttttggctgagacaaaagcggatgaattgatgtttgtgtcacatatttacaatcacgaagagcggctccgttcttatgaattgcttgcggaactgaagaaggattagattggtggacccgttccggacgatccggaacgggaaaaatacagcccggtatgtgtaaaattttactatttactcttcagaactgctacagcccggcacggattgacattttttcaattctgtatataatagaatagtgatgtttgtcacgaattcaatgatatgccggtgtggcggaattggcagacgcgcacgactcaaaatcgtgttccttcgggagtgtcggttcgaccccgaccaccggtatcgtgtaaaaatcagggttctcacattgtgggagcccttttttattcgttctgcgtgccgggttgaaaaaatgaggcccgcgatccgtgtgcagttttgggggaaaaggaagagtgaaagaaaagaagttacagcccataaaatgagaccccctccttcgatcgtgtgaaggaggggaccggggtgccggaaaagaataccatcccggtttactacctgcctgttttaacagaacagggtgttaccgccttaaacgaagctggaattactgctggtacaaaatcgtctgggccacgcctataaagtactctgattctataataatatggttcaacaccactttagctgtcgggttggtgctgatcggttcacttgcttccataagcgtgcggcaaaaccggataaattgttcactctgctgtaagcaaaattgggtgagttgcaaaatatcctggtagagtgcctgagaaacttgtccgtttgaacgattcaccgtctcaatataccttattacgcgatgatgtgcctctgaaaaagctttttcccatccctgtaatgcctccacatatttttgctcaagatttctgacaagctcccggatcacaatcgtatgttcttcttcctggtgtttctaaaactcagcctcatccagtacacgaagagtcatttgattcccataataatactgcatagccgcatcctccatcctattggtcacttcatacatattcaaaggatggggcagtagaacaagacaaggggttgtgtactggtacgaaaaccgttggactatcttcctgttgcttattttaagagccatcgtgtgcaaggccgctttttgccggaaaggcagccgcgggcactttctttgatgatttgcaccgggataacggcagaacccggaaaaaaaccggcctaaaaagaagagcgcgcgattttaaaaagtccgcttcctttgctatcctttaagttacaaacagaaaagaaaggaatagcgaaatgaagaagcatttaatttctgccatctccattgtttccgccgtgtcagcactgttgtttctggccggcctgtggatggtttttgaagaccagcaggcgaataccggcgtaaagacggaaaataccggaactggcaaaaacacgaaaaaagcgggcaatacaaacgagatcacgattacagcaatcggcgactcgctgacaagggggacgggggatacagccggaaaggggtatgccggttatactgcggatgaggtaaagaaaaaaacaaagaaggctgttctgttgcaaaacaatgggatcaaagggcttacatcaagcgggctgctggaacagatcaaacagccgcaaatcaaacgtgaactccggagtgcggatatcattttgctgacgatcggcggtaatgatttgtttgcaggcggggaggcgcttggccatttggataacgcttatatcgaaaagttggaaaagccttatttggtccatttaaaacagatctatgcagggatccgggcggtaaacaaaacggcaaccgtctatcacgtcgggctgtataatccttttattgatctgtctcaggcgaaaaccacctctgcgatcgtccggaaatggaattttgattcggcttccgtcgcagctgattttccaaaggtggtctatgtgccgacatttgacctttttgaactgaatgtgaacgactatttgtacagtgacaaattccatccgaatatggccggttatcaactgatcggagagcgtgttgcttccctgatccatttccgggaggagaaagcgaaatgacggctattcccgcacttaaggtgctcaatgtaaggaaaaaaattggcaggaaagaaatcatcaaaggcatcagttttgaagtaatgccgggagaggtgttcgggtttctcggtccgaacggggcagggaagacaacaacgatccggatgctgacaggcctgatccgcccgacttcgggaaaaattttcattggcggaaaaaacgtccggaccgagtttacggaagcaatgaaaaatctcggctgcattgtcgaaaatccggagatgtacccgtttttgaccggctatgaaaaccttgcctattttgcgcggatggatccgtccattccgaaaaacaggctggatgaagtggcagcgctcgttggcttaagcagccggatccatgataaagtgaaaacatactctctcggcatgcggcaaaggcttggcattgcccaggcgctccttgggaacccgaagcttttgattcttgatgaaccgacaaacgggcttgacccggcaggcatccgggaaatgcgcgagtttatccggtcgcttgctgaaaaagagcatttaagcgtcctcgtttcttcgcatttgttaagcgaggtgcagctgatgtgcgacaaggtggccattatccataacggccgggtggtccgcaccgggaatgtacatgagctgctttccgaaaaagcgcgcaccttttggaaagcagtcccggcagaaaaagcgcgcaccttgcttcaggcggaaacacaggtggcagagggggaagacggcctccttatcaccccatatgatgaagaaaaaaatgctttatggaacgagatgctcgtgcaaaacggggtccgggtaaaagaaataaaagccgtgctgccggcgctggaagatttgtttttggaactgacagggggcaggaaaaaatgatccgactcatatacaatgaacagctgaagctttggaagaaaaagcggattcttgttattatcctgattatcgcctgccttgttcccatttttacctacgcgcagtacaaagaatcaaaagcgctgcaggaaaaaatcgggacaagcgactggcgggtgcagctccagaaacaaattgtcgatacgcaaaaccggcttggatcggcaagcctttccgatgatttcaaaaaatatttgcgtatgacattgagccaggaacaatattatctcaaccataacatcaatccgaacgcgccgggcgccccgacgtttatgcgggtatttattgaaaatgcgatcgggatgcttttgccgctgttcgtcatggtggcggcgagcgatatcgtgtctgccgaggcgggcagcgggacaatcaaattattgctgacgcgccccgtgaaaagatggcgcatcctgcttagcaaatacattgccatgctgctgtccgtttcgtttattttgctgtgcacagccgtttttacctatgccatttccggaatagtattcggctaccgcggctggaacatgccaatgcttaccggttttacgataaaaggggacgagctccttactgcacatgtgcatgctgtcccgcaatggaaatatttgctcatggcgttcggccttgcctggtttgtctgcgtcgtttcaggcagcctcacgtttatgctttctgtcctgttgcgcagcacggccgccgtaatggggattatgttatcctcattgattgccggcgcgattttgaccaacatggtatcggcctggccaagcgcaaaatatttgtttatggtgaatttgcagctgacgaattatctcaacggcacaagcccgcctgttgaaggcatgacgctcggattttcggttgctgtgctgcttgtatggctttttctttcgcttatggtgtcttttgttgtgtttacgcaacgggatgtttattaagaaaaacggaattccgccaatttccggtaaaattttttcgctgcattaatacaatgataaagcaggattttttacgggacagcgcgaatttcgtatgataagcaaagggggagatgctgtgtttcaacggtttatcgttgggatggggattgctgtgtttatgtttattgcaggtgtcacgtatttttactttaacaaaggagaagcaattgcaacggaggcagcaccttcgaaaaaaccggctgcagaggaagagacggctgcaaaagcggttatacaggcaagtttccgccagaagacgcctgagcgcaaactttcggcatacaaaagcatgaacgaagaagaattggtgcaggaagtacataatatgacgcatcaaaaagtggcggcaaatgaaaaatggggagcttccgaaatcacagaagaaaaggtggacgccctgtattcggcgatcagcaatcaaacttttgcggatacagaactgcaggatatgctgctcggtatattaaaaccgtggaaaaaaggcgatttcagcaatgcggtgaaggcccataatgagatttgggcttaccagaaaggcaacatcggaaaagcggagcggcggttgacgccttctgaagaagcggcatatattaaggaaaatttcaaatgacatcaggaagtggaaacggtgaaaattttaggtatatccggctcgcttaccggtgagaagacctccattggtgtatatgaggtgcttatggcaattaaagcggaagattcggaagcggaaactgaactgctcgatttaaaagattatgaagtggagtttgcaagagggtttccactttcttattacaatgatgatacgattgcggccgttaataaaatgctggaagcggatatccttgtttttggctcgccggtataccaggtgtccattacaggcgctttgaaaaatctgctcgaccatttgcaccgcgatgcttttcagtccaaagtatgcggtattgtgatgaacggcggctcggacaaacattttcttgttgctgaataccagctgaaaccggtattaacctttttaaaggccacctgtgcggtccgcaatgtttttattcacaatgatgattttaatgaggacaatgaaatcatcaataccgatatccaggcacgcatccgaaagcttgcgcatgaactgttgcaattgggaaaagctttctccagaggcaatcctggaaatttgggatgatgcacttttgcagcatggtgctgcagccgttgcgcgcgggcggtagcgtatcatcagcgaagcttagcgcaggcgtgcttaaagcgaaggaaggcgccggatatttttgccgctatcttgccgcatgcatgcagcaccagcagaaggatgaaaaattcgggcaattttttaggatagacagaaggcgaacacttttccacgctttctgaacgttgtatcgttctttaggaagaataaaaaaaagcgccggcgggcagccggcacttttttactgcaattcccttttcaaaatctgttctgcatgtgcaacttgttcttttgtcggcggttcgacacctttgagggggtagtcaatgccgagcgcctcatatttgtagacacctaacttatggtacggaaggatttcgattttttcaacgtttggcagggaatggataaaatcagatgttttttgcaaatcttcttcagaatcgaagccgggaacgagcacatggcggatccagaccggaatatgcttgtcagcgagatacccggcgaaatcgagaatatgctcatttgacatgccggtgagccatttatgcttttccgggtcaatatgcttgatgtccagcaatacaagatttgtatattccatcaattcatccagtttttccataaaccgcgggctgcgcgagaaacatccgcctgctgtgtcaatggcagtatggacgccaatttctttgcacgctttaaacaattcgatcagaaaatcgaggtgcaaaagcggttcgccgccgctcactgtaatgccgccgtgggaagcttcaataaaaggcaggtaatcgcgcacatcactcataatctcttcgacgctcatttcattgccttcattgattttccacgtatccgggttatggcaaaatttgcagcgcagcgggcagccttgcgtaaatacgacatagcggatgccgggcccgtcaaccgtgccaaatgattcagtggaatgaatgcgcgttgtcatgttcatctcaatcaaatccttctatatagattccccataagttaagtgttaaataggggggagggggcatgccgcccgaatcagtttacatcatttcatggaacgtccggttaatgacttcaagctgttgttcccttgtcaatttgatgaagtttaccgcatatcccgatacacggatcgtcaattgcggatatttttccggatgatccatcgcatccagcaatgtttcgcgatgcaggacgttgacgtttaagtggtgcgcttttttcgccatatagccatccagcatgccgtccaggttggagacctgtgtttcttcttcgtgtccgagcgcttccgggacaatcgagaaagtgttggaaatgccgtcaagcgaatatttataaggcagtttcgcaacagatgtcaacgatgcgactgcgccgtgcgaatcgcggccgtgcatcgggtttgcgccaggggcgaacggttcgcctgctttccggccgtccggtgtgcttcctgttttcttgccgtatacgacgttcgatgtaatcgtcaggatcgaagaagtatggacagcgttccggtaagtcggatatttttgcagtttttgcataaacgatttgacgagattgacggcaatttggtcgacgcggtcatcattgttgccgtatttcggataatcgccttcgacttcatagtcaacggcaaggccatcttcgtcacggatgacttttactttcgcatatttgatggcgcttagagagtcggccgcaacagacaagccggcaacgccgcaagccatcgtgcgcagtacattgcggtcatgcaatgccatttcaagccgttcgtagctgtatttgtcatgcatataatggatgatgtttaaagcattgatataaacgcctgcaagccagtcaagcatccggtcgtatttttccattacttcatcgtaattgagatattccgaagtgatcggctggaacggaggtgcgacttgcattttataccgttcatcaacgccgccgttaatcgcatatagcaaagcttttgccaggttggcgcgggcgccgaagaattgcatttgtttgccgatccgcatcgccgatacacagcaggcaatgccgtaatcatcgccgtattcttcacgcattaagtcgtcgttttcgtactggatggcgctcgtcttgatcgacattttcgcgcaatattgtttccatttatccggcagtttcgtcgaccagagcacggtcaggttcggttccggcgcagggccgaggttgtcgagcgtgttcaggaagcggaacgagtttttcgtaacgagcgtacggccgtccaaagccataccgccgatcgattctgttacccatgtcgggtcgccgctgaacagttcattatattcttccgtccgtgcaaatttgacgaggcggagtttcatgacaaagtggtcgacgagttcttgtgcttcccgttcagtcaagacgccgtttttcaaatctctttcaatataaatgtcaaggaaagaggatgtgcgcccaaggctcatggccgcgccgttttgttccttaatggcagccagatacgcgaaatacagccattggaaagcttctcgtgcgtttgaagccggttcggaaatatcgaatccgtagctttgtgccatttgtttcaattcctgcaatgcgcggatttgttccgaatgttcttcgcgttcgcggatgacttcttctgtcatcaagccgcagccgattaagtcaagatcttttttcttttgttcaattaaataatctaccccgtaaagtgcaacgcgccggtagtcgccgataatgcggccgcgaccgtaagcatccggaaggccggttacaatgcctgcatgccgtgcagctttgatttccggcgtgtaggcatcgaatacaccctggttatgggttttccgccattctgtaaaaatatgtttgatttccggatcaatttcatagccgtaagattttaaggcgctttctgccatccggattccgccaaacggcatcatcgaacgtttgaacggtttatcggtttggaaaccgacaattttttcaagttctttgtttaaataccccgggccatgcgatgtaatggtggatacaattttcgtatccatatccaggacgccacctttttcgcgttcctgtttcgatagttccatgacctggtcccataattttaaagtggcttcagtcggaccggcaaggaagctttcatcgccttcgtaaggggttacatttttcaaaataaagtcccttacgtcgatttctttttgccagtttcctcctttaaagccttcccattgttttttagagagcggtgcttttgtcagcaattgttcagtcattttaaattggcctcctttaagcctattaatgagctgccttcagaattggatgtttgtttgttaaatagtgaacatttcttattacgccttcattttagcacgggcaattttaaaaagatagtgatagcgttcacattttagggccggaaaatgcagttgtcaaagaatgttcaaaacatttggccgtagatatataatagaaaaatgcgatgaaagcgtgttataacacaaattgatcagtttttcacatgattatttttcttggaaggagtttgtaatttggtaacatgatcaatatttcacaaaatagacacagccagatgaaagcggttgcggtatatttttcgtgtaagcttgaattttttgcttacatttaaaagctggatcatggtattcccccctatatgacatccatttttttaattttaagcgctgatgcaattagaatggcaacttctaaaacgagtaaaataaatatactgtaatgaatatttaaaatatttgtaatataagctattcgctttgcctaaattttgtttgaaacccattccgtaattactaagggataaataataaatatactttggcagccctttttcactaattgaaatgcaggaaaaaacgatataaatattgacgatcagaaacgcaatgcaggaatttaaaaacatttccaaaagagactggaggctgatgataacatagatcatcaaaaaataactgaatagcaatattcccattccattatttacattcacttgcccccaaaaaaccctgatcaaattgataaggcactggcagccaatgaacaccagtaatgatggctgtcaaaagccccttcctttgtaatcgcttcataaacgttcaaaatatatacaaacacaaacagggaaaaaggggatatgatagaaaggcagttatttgtgatatagttcacaattaaatattttttcatgttggagatggtgtttatgtacgaggccgttgaatctgttgttcaaatggcattaaataagaaaaaatatctggaagaatccttgcttcgttatgtgacaaaagcagtgttggcaagtatgtttatcggttttgccattattatttgttaccgtcttgccgagccattttttgatgcgaagtctccggttacttcctttatggcttccatatttttcggtgcagcgctcgtgcttattatgtttggcggcggcgagctatttaccggcaatacgatgatgatgacgatgagcacggtaaaaaaagcgacaacttggaaagatgcgctcacaaactgggtggcaacgtatgccggaaatttgatgggggcggcgattttcgcactgtttatccattacagcggactctatgcagattcggataacagccagtttttaatgtcggttgtgggcgggaaaatcagcctgacaacagcccaaatgtttttccgttcgatcctttgtaactggcttgtttgtttagggttctgggttccgataaacgtaaagggggacggggctaaaatcgcttcgatgatgctgctcgtgtttggcttcgtcatttcgggctacgaacacagcattgccaatatggtgctgttcgcgctcgcacttgctgccccgcacccggatacgattacactcgttggcattttgcacaacctcggcgtggtaacgctcggaaatatgattggcggcggcgtctttgtcggtgccatgtacgccttcttaacgtcaaagaaaaaagaaaaggtgccggttgctgttgtggacacacacaccgtatcccctttttctgttgaaaaaatcaagtaatattaaaaagagctgccttttattcaggcagctctttttaatatgggattaaccgctccggcccgtcagctttggatcagctgcaggaattgcttggtccgtgcgttttttggatgatggaacacttcttccggtttgccttgctccaggatgacgccgccatccataaatatcaccttgtccgcaacttcgcgggcaaaccgcatttcgtgtgtcacaacggccattgtcatgccttcttcagcaagctctcacattcagcacgccgcttacaagttccggatccagtgcggatgtcggttcgtcaaacagcatcacttccggctccattgcaagcgccctcgcaatcccggcgcgctgctgctggccgccggaaaggcttgctggatacgcctcttttttatcaagcaggccaccttttccagcagcatttccgctttttttgctgcatcctggcggttttccttttttacaatgaccggtccctcaatcacgttttcgagaaccgttttatgcgggaaaagattgtactgttggaaaaccatgccggatttttgccgcaaagctgcgagttcttttttaccgggatgctgggaaaagtcaacggatacatcatcgatctgtatcctgccttgatttggaatttcaagggcattcatacagcggagcagcgtggttttgccggaaccggacgggccgatgatgacgatcactttccctttttcaatggttaagtcaatgcctttcagcacttcaaggttgccgaattgtttatgtaacccttctattcgaatcatacaggtccctccttacttgctgatgtatttatcaaaacggccttccaatttttgctggatcatcgagagaatcaaacaaatcacccagtacaaaaaggcggcttcgacatacagcagcataaattgataagtggtggaggcaatttcctgggctttacggaacagatcggccaccaaaatcaaggaagcaagagatgtatcttttacaaggctgataaacgtattggaaagtggcggcaccgatacgcggacagcctgcgggaacacaattcttcttaaagcctgcgcatagttcatcccgatcgaataggctgcttcccattgtccctttggaatcgacaaaatcgctgccctgatcacttctgatgcatacgcgccgacattgagcgaaaagccgataatggcggctggaaaagaaccaatggtaatgtgcacagacggcagcccgtaaaaaatgataaataattgcacaagcaacggggttccgcggattgctgagacatagattcgggcaatccattccagtattttaatgccggaaatacgtgccagcgccgtagcgagtgccagcacaagaccgatacagaaagtgatgatcgttaatggaatcgtataatgcaaagctcctttcagcatcgacagaagggaactttgcaccaaatgcagctggtcgctgctgataaacgcaaggttattgggaaacatcttcaccaaaccatttctttgaaatttttgttaacgtgccgtcttttttcatatctttcaaagcatcatttactttgtctgtcagtttccctgaatgtttccggaacaaaaaagcggatttgcttgcctcgtttgctgtagcggcaactttaatggcagcattcggtttttgctttttgtagtccagataggtcagggaatcattgacggtggcatccacacggtttgaagtcaaaagctggaccgcttggttaaatccttccacacttacaatattggcgccatttttcttggcaatatcagcatagttacttgtaagcgattgggctgattttttgccttttaaatcagcaaaggacttgatgttcgtattgtctttgcggacaaggacaacggcttttgaaatcgtatagggtgttgataaatcatattttttctggcggtctgcgcgaatcccgacttggtttgcgatcatatcaaaccgtttggaattgagcccggcaaacatggcatcccactgtgtttctttaaattcggcttttaatccgagccgttttgcaacttctttcgcaacatcaatatcgtagcctgttaatttcccgtttttatggaaagaaaatggcgggtacgttccttctgttccgatcaaaaggacgccttttgatttgatctggtcgtataagtcattggattttgaagcgttctggttgtccgtattttttccgcatgccgttaaagcaaacagcaagctgaacacggccagccatttgatgtattttctcatgttgccaactccctttcatgatttttgcagtctatgcctatgctttaaacagcattttgtattgtaaacaaaggggtaaaaatatccagaaaaaaggctttgtatcgtaaaatgggttagcggcagaaaggggggataaagcggaaccggcttgaaaaaaagccggcagtttttcaagatgtttgagcgcacggtcagcggatattgatgagcagataaagaaaccagacggcgtgatgctgttcgtcttttgccgcttcaagaaacgcctgcttcatggcagggctatttgcggaacgcgccaattctctgtaaaaatcgaccgtgttttgttcgtctttcacggcaaattcaagccctcctttgtaagtggaagggcaggcttcgctgatttgcggctgcggccttctgcctgtgaggttcgtgtaaaactgcgaaaatgtgtggaaatggcgaatttcatcatcacggatttccataatgatgttccgggcttcagccgacggggctcttcttgcgatttgctcgtagcaggcgatggcgctgtattcgccgtttattgcccggatcagatgggcgagccatactgcctgctgatttccggcgtcaggctgtgtgtttctcaaaccggcatgattatcaaacggatggacaaacattggattccctcctcactttcaaccggtatatcgtatgacgggcaaaagcggatcgttacgattttttctcatccatccggcggacaatgtttaaaaattttcccgaaatgttttataatagaaatgtctatgccagatttccgtcatattttttaagaaaaggagcaaagaaatggaaaaggtacttgttttcggccataaaaacccggatacggatgcgatttgttcagcgattgcgtatgcagagttaaaaacaaaattaggtgttgatgcggaggcggtccggttaggagaattgagcaatgaaacgaaattcgtattggaaacattccacagggaagccccgcgccttgtccaaacggttgcaaacgaagtggaaaatgtcattctcgtagaccataatgaacgccagcaaagcgcggacgacattggcagcgtgcgtatccttgaagtcattgaccaccatcgcatcgccaattttgaaacgagcgacccgctctattaccgtgcggaaccggtcggctgcacagcaaccattctaaagaaactttacaaagagaacggtgtggaaatcagcaaagaaacagccggattaatgctttctgcgatcatctccgactcgcttttgttcaaatccccgacttgcacggaagaagatgtgaaggcggcgaaagaactggctgaaattgccggtgtggatgcagatacatacggccttgaaatgctgaaagccggcgcggatttaagtgacaaaacggtggaacagctgattacccttgactccaaagaatttgatatggccggccataaagtgatgatcgcccaggtaaatgccgttgatacaaatgacgtgctcgtgaaacaggcggagattgaacaggcgatccaggcgcagattgcagacagagggcttgatttgttcctgtttgttgtaacagatattttaacaaacgattccgccgcgcttgcactcggcaaatcggcggatattgtggaaaaagcctatcatgtcaagctggaaaaccacacggccactttaaaaggcgttgtatcgcggaaaaaacaaattgttccggtcttaaccaaagcctttcagggctgaaaaaaagccgatgccggcacatggcaccggctttttttaacccggaggaaaggaacggggctttcagatccccgtatgttcctgggaattatgctgtatttttaaatccttgcttgcggaatacctgctgtttccgaatatggtaccggttttttcaacctatgggaaaggaactggattttaacggctttccgaaagaagtctcccatcctcaaggaatgtgaaggtgnnnnnnnnnnnnnnnnnnnnnnnnnnnnnnnnnnnnnnnnnnnnnnnnnnnnnnnnnnnnnnnnnnnnnnnnnnnnnnnnnnnnnnnnnnnnnnnnnnnnagtggtgggtagttcacaatacccgtttgtatggatattgtgccgtgtatttcaaatttccatggaccagattttttaccacccgggaccggaacagggctttcggatatccgtatgttccgcataaggaagcggactgttttacagcttcgggaacaggccgtggatgccgcttgcgatcatttgaaccgccatgacggctagaatcagccccatcagcctcgttataatgttaaggccgctttgcccgagtttggaaataatcgaagatgaataataaaacaatacaaaggttaaagcaagcacaatcgtatagccgactaaaacacttgccaaatttggcagggaatgggaagacgtttgcgccatgacagttgcgatcgtcccgggcccggccaggatcggaagggcaagcggtgtaacggaaatgtcatctcgcgcttcgacttctttccgctcattcggatgcgggctttgcgatcttgcatttttagcgtgcagcaggctgtaggcaatcccgaagattaatatcccccctgcaacgcgaaacgcatgaatcgtaatcccgaagacctcgaacaataattttccaatcaaaagaaaaaccgttaatatgataaaagaaacaatgaccgctttgcgggcggttttccgtttatcctttaaggaatatccgccagttaatgaaatgaagatcggaatattcccgatcggattcatcactgcaaaaaaaccgagcgtaagttttatgatttcgccgaacaatttccacccccctttccgtttactttctatagcattaccctgttggcggaaaatgtaacaagggccaacggtttttagatcggatcccgcgtttgaacgggcgcctttacagaagcggatgtctttaatataatgttcatatcgttttgatgtatgcaagaaagagcgcagtgtttcacccggaaagcgggggaggatacctgcgtttttgttgtggccatcatttttacatttgcatgatggcgctttttacaatgggcaacaagcagcaatacttatttgttttttatatagattgtttgttttttgggaggtgaattatggatacggccgaattgaaaaaagaaatcattgccttcagcaaaaagatcgggatcgataaaatcggttttgcctctccggatccgtttacagagctgaagcagcgccttatccgccagcaggaactcggctaccagtccggttttgaggaaaaagatattgaaaaaagggtgaatccttctttgatttttgattcgccccagtcgattattgccgttgcgctcgcctatccgtcaaaaatcaaagatccgccgaaagggaaaaaaggcgcacgccgtgggatcttttgccgggcttcatggggggaggactatcacaccattttaagggacaagctttcgaaactggaagattttcttaaagaaaaagtggaaggggcccgctgcaaatcaatggtcgatacaggggaactctccgaccgggcggtagctgagagggccggcataggctggagcggaaaaaattgttcgatcatcacaccggaatttggttcctatgtgtacttaggcgaaatgattaccaatattccgtttgaaccggatacgcctgtcgaggaccagtgcggggactgccggaaatgcctggacgtctgcccgaccggcgcgcttgtttctgccgggcagctcaatgcgaaacggtgcatcagctttttaacgcagacaaaagattacctgccggatgagtttaaagggaagatcggcaaccgcgtgtacggttgtgattcgtgccagaccatctgtccgaaaaacaaagggatggattttcattttcatgaggaaatggagccggaaccggaaacggccaaacctcttctggaaccgattctccgcctcagcaaccgcgcgtttaaagaacggttcggccatatggcaggatcgtggcgcgggaaaaagccgatccagcgaaatgcgatgatcgcgctcgcccattttaaggaagaaagcgcggtaccggaactgatccggattttgcaggaagatccgcgcccggttattcgcgggacggctggctgggcgcttgggaaaatcggcggggaagaagcaaaagcggcacttctttccgcacgcgaacaggaagaagatccggatgcccgcaatgaaatcgaaaaaggccttgcctttttcgaatagcccatgccgcggtgaacgcggcaccagcaggagaatgaaaaccagccggcgcatatttttaggatagacagggatgctgtttcttttggtggatgcgggtgaaaatccgttgctgcgttaagaaagcccggggaccgttccttcggctgccgctttttatgtgccaaaagcagagccaacgcaaattttcagcaaaacaaaagagccattgcgctttcacactgatttcccccgttttttcatcatatagtgatgaagagaggggggtttctgattgaaagaacaaatccaggcacatcttgaaaacaggcttgcccactttaccgggcgtggaacagagcgggaatttgaagacattgaacgaaaaaagacggggctttcaaatcgggatgcccggattgtaaaggtgaaagcggaagcaaaagtaacccgggctgaccaggagggaagccacaactttctttattatacggtgcacatgcaatatatgatcaaacaaaaagcggctttttacatcgaagaagcagtggaggaaagaaaagcatctttttatgatggaaggctttatgaagatgaagaacttgtgccggatattccggaatggcgcggccctcagccggatgataaagagcagaaagctgtttcatccggcggcgaacggatcgcatatgtgtatgaccgcatgaaagctgtccagtatgcggaaaagtggtggaaccgttttaatccggcttacaaatcgttcacggatgactgcacgaactttatctcgcaatgccttcacgccggcggggcaccgatgcgcggatacccggacagggcaaagggctggtggatgatgcacaataattggagttacagctggacggttgcgcactcgtttaagacatacctgcagtattctaaaaccggtttgcgcgcaaaggaagtttcgtccccgcaggagctgaagtacggcgacgttatttgtatcgatttccagggggacggccggtttgaccatacgctcattgtcacgggctatgattattacggcatgccgcttgtgaatgcccatacgaccaatagccgcaaacggtactggacatatgaagactcttccgcctatacgccgaatatccggtacaagttttttaccattgaagatgacagttgagaaacgtgttataataagtcccgaggtgacaaatgttgagcttgcatgttgtattgtaccagccggaaattcccgccaacacaggtaatattgcacgcacttgcgcggggaccgggacaacgctccatctgatccgcccgctcggcttttcaacggatgataaaatgctgaaaagagccgggctggattattggaagcatgtgaatattgtctattatgattcactggaagaattttttgaaaaaaatgcggacggcgagatttactacattgagacgtttggcgaaaagccgtttacggattttgacttcagcgatccggacaaaaatttatatttcatgttcggccgggaaacctcggggctgccgaatgacttgattgaaaaaaataaggaccgctgcctgcgtatcccgatgacagacaaagtgcggtcgcttaacctttccaatactgccgccatccttgtgtatgaagcattgcggcagcagcattatccgggattaaaatgacaaagggccgggctggtttatctcccggcctttcgtttgcggaaaagctccaatgccgaaaatggttcgggaacatcctcccttttgcccatggaagatgcccgatacaaaaaaatctttcgaacgttaagcttgcacttaatactccggttcttgctcgcgaaagttttcccctttttcttcgtatccggccgtaaaaatggcagacaggaatgaaatcgctaccaatataataaggaacgttttcaattggacattccccctgtttttccttctttgaacccattatagcccatttcactgaaagatgcacctattttcaatttttgaacgtatcggcttcatcaggatccaccggctctaaaccaagttttcccatctctgtctttcgccgccatccgatgtcctcccgctccgaatgaggttgtctctttttatcatgttccctcgcttgggggcatagattatataaacgtctcttcaaaaagactaaggggaggtacgaaatggatattctgaggaaactcacaaactaccgtgaagaagaggaaaaactgagatgggaaggaacgttcagggattatcttgacttgctgaaagaaaagccatgggttgcacaatccgctcattcccgagtttacaatatgattaaggatgccggtgtggaggaagtagacggagtaaaaaaataccgttttttcagccatcaattattcggtttggaagaggcgcttgaaaaattggtggaagaatatttccacccggctgcgaaaaggctggatgtcagaaaacggattttattattgatgggacctgtaagcggcgggaaatccacgcttgtgacgatgttaaaacggggccttgaagcgtattcgcggactgaacagggtgctgtttttgccatcaaaggctgcccgatgcatgaagatccgctccacttgattccgcaacatttgcgggcggatttttacggggaatacggcatccggattgaaggtaatttgtcccctttgaatatgctgcggctagaggaagagtatggcggaaggattgaagacgtgctcgttgaaagggtctttttttccgaagacaagcgcacggggatcggcacattcagcccgtcggatccgaaatcgcaggatatcgcggatctgaccggcagcattgatttttcgaccattgctgagtacggttccgaatcggatccgcgcgcttaccgcttcgacggcgaactgaacaaggccaaccgcggcattatggaatttcaggaaatgctcaaatgcgatgagaaatttctctggcacttgttgtcgctgacgcaggaaggaaatttcaaagcaggccggtttgcgctgatttctgccgatgaattgatcatcgcgcacacgaatgagactgaataccgctcttttattgccaataagaaaaacgaagctctgcactcgcggattattgtcatgccggttccgtataacttgcgggtaaccgaggaagagaaaatttatgaaaaaatgatccgggaaagcgacgtggcggatattcatattgctccgcatacgctgaaagttgcggccatgttcactattttaacaaggctgcgcgaaccgaagcgggcggatatcgatttgctcaagaaaatgcgcttgtatgacgggatggcagtagaggggtacaattcacaggatgtaaaggaactgaaaaatgaatatcaggatgaaggcatgttcgggattgatccgcgctatgtcatcaaccgtatttcctctacgatcatcaaaaaagaaatgaaatccatcaatgccctcgatgtgcttctgtctttgaaggaagggcttgaccagcatccgtcgattaccccggaattgaaagagaagtatttaaatttcatttctttagcgcggaaagaatacgatgaaattgccaaaaaagaagtgcagaaagcatttgtatattcgtatgaagagtcggcgaaaacgctgatggacaattatctcgacaatgtagaagcattctgcaacaaagtgaagctgcatgatcctttgacaggagaagaaattaacccggatgaaaaactgatgcggtcgatcgaagaacagatcggcatttcggaaaatgcaaagaaagcgttccgggaggaaattctcatccgcatttcggcttatgcgaggaaagggaaacggtttgattataattcacacgaccgtctccgtgaagcgatccagaaaaaattgtttgcggatttaaaagacgttgtcaagattacaacatctacaaaaacgccggatgaacaacagttgaagaaaatcaatgaagtggtggcacgtttaattgatgattacggctataactccacatcggccaatgaactgctgcgctatgtcgggagcttgctgaaccggtaatccggcagccgggcgatatcagcccggttttttcttacccggtagtggtctgtttttcaaagaaaaatgtcaaatattctgctttattgcataagataatgtaatcttaaatgttataatccaatctggtttttaaacgccaaaatagcatatgaattgatttccggtatggtgacggcgcaagcattttcaaaaaagggaggatgagcatggataaacaggatcagaagcattttgttctttcacaggaagactggtcgctccaccgcaaagggcatgatgaccaggtccgccatcaggaaaaggtccaggaagccatccgcaacaatctgcccgacttaattacagaagaaagcattatcatgtcagacggccgggatgttgtcaaaataccgatccggtcattggacgaatataaaatccgctataattatgataaaaataaacatgtcggccaggggcagggcgattccaaagtcggggatatcattgcacgcgacggttccccgcaggaaggcccgggcaaaggccagggagcaggagaccagccgggagaagactattatgaagcggaagtaactctgatggagatcgaggaagcattgttcagccaattggaactgccgaatctccaaaggaaagagcaggatgagaacacagttgaagcgattgaatttaacgatatccgaaagacggggctgatgggcaatatcgataaaaaacggacgatgatgtcggcgtttaaaagaaatgcgatgaatggcaaaccggcctttcacccgatcgtgccggaagatctcaaattccgcacatggaatgaagtggaaaaaccggaatcaaaagcggttgtccttgcgatgatggatacaagtggaagtatggggatatgggaaaagtatatggcgcgcagctttttcttctggatgacgcgttttttgcggacgaaatacgagaccgtggaaattgaatttatcgcccaccatacagaggcaaaagtcgtatcggaggaagatttcttttcaaaaggggagtccggcggcaccatctgttcatcggcttaccggaaagcactcagcctgatcaatgaaaaatatgacccgtaccgctttaatatttatcctttccatttctcggacggcgacaacctgacatcagacaatgcgcgctgcgtgaaacttgtccagcaaatcatgaaagtctcgaatatgttctactacggggaagtgaaccagtacaaccgccacagcacgctcatgtcggcctataaaaatattaaagatgaaaaatttaaatattacgtgctgaagcaaaaagcggatgtattccatgcgatgaaaagctttttttcaaagaaagcggacaaagctttggcataagaaaaaaggggctgcacaacggctggtgcgggcccctttttttgcgggtgctgaaacatggatgattcgcctgagtcggtatgcgccgcgcgctgtgagctcataagttttctacccatatcttatatttaaggatgccatcttcccgaaattcttctgtatgaacaaggtatgttacatctggtaatccacataaagcataggtaagaacactagcaactttcaaatcaggagtaataaatccccttccttctcccatgtcactaacgctggagaaccccacttcttcagcctcccgaaatgtatcataaattcgatcatctatcgtccattccatggggatatctcctttcctttattctatggacgctaaaaatgttcctctcttaaaatggaatagattttgatatcccaatgttttccttttgcataaacggctttgcgcaaagtgccttcataggtcatgccggatttttccatgacgcgggcggaagcaatattttctgcaaaacagcgggcctggatgcggatcagatacatgcgttcaaaaccgaaggcgattagctttttagcggcttctgtcatgatgccttttccccagtactcaggagaaagggcatagccaatctcggctgttccttcttccggcttccaccatacaaaatcgaccgtcccgatcagcttccgtgtctttttgtcttcaattccccagggggcaatcctgtgttcgcggtactggccgagcacaaaattaatgaaatttttcgaatcgcggacagaccggtgtgcatcccatgtcacgtattttgatacttcacttcttgatgcataggaaaataaatcgagcacgtcatcccgcttcagctttcttaaaacaagccggtccgtttcaagcagcggcaagttccggtatatgtcttcgattctcacgtctatcccccgcagttctgattggtttattaaaaatgtatcataaaatggaaattcttcaattgtttatgtaaatttctttcgtataaaaaaagagcacgctgaacgctgctctttttttaaccccgttttaccaaaaaaggcttacaatatgataaatcgcaccggacaaaacggctgaaattggaagggtaatgacccaagtgatcaccattctttttgcagtatcccacttgacccctttaatccggtgggccgaaccaaccccgagaatggaggaagaaatgacatgggtggtgctgaccggcaagtggataaatgtcgcgccaaaaatgatgaaagctgaactcaggtcggctgcaaccccgttaatcggccggatcttcataatattgccgccaaccgttttaatgatccgccagccgcccatcgcagtgccaagccccattgccgccgcacaaccgacctggacccagaacggaatatggttatcagcgatataatggttggcaatcaaagccattgtgataatccccatcgatttctgggcatcgtttgtcccatgggagaaagactggagggcggcggtgaaaatttgaatcagccggaagtgccggtttgtttttgcaagattaaaattctggaatgcaactttaaaaatgctgtaaaccgtaaaaccgatcgtaaaagcgaggatcggggataaaagtaaggcttcgataatgctgataaaaccacggtattcgatcacatgaaatcctgacgaggcgatcgccgcgccggcaatggatccgataatcgcatgggaagaactgcttggaatgccgaaataccatgtaatcaaattccaaataatcgctgaaatcaatgaggacaaaatgacaatctgcccgtttgcaagggtgaacgggttcacaatactttctgtaatcgtctccgcaacacctgtaaatgaaatggcgccgagaaaattcataagcgcggccattataatcgcatgccggggttttaatgcttttgtcgaaacggccgttgcaatcgcgttcgccgtgtcatggaatccattgatgaaatcgaatccaaatgcaaaaatcacaattaagacagttaatactaaaatgctatccattcagcagactcctcacgcatttttcatgataatcgtctctaaaatgtttgccaccgtctggcagtagtcggccacatcttccatcttttcatacaaatccttatatttgatcaggcggatcggatctttttcgttttgaaagaggtggattaatgattttcttaaaatttcgtcacaatggaattcaaattctttaattttaatggcatgcgggcgaatcttgtcgagttttttcgaaaaaaggatgtcgattgctttttcaatttcttcggtacagcggcggatcatttcaacgaattcgaccataaaatcgtctgcctggtaaatattgtacagttcaaacaatccggaaacttcttcaatgccgtccaacacgtcatcgaggctgttcgtcagtgacaaaaggtcttcccgttcaatcggggtgataaaggcatcgttcagttccagaatcatgtcatggacgtaagtatcccctgtcgtttcatactctttcattttttcagtaaaaatttttaaatcgtctttattatggattttatagtcggcaaagtaattggtggcttcccggagattggtcgaaatatggccaaacagcactgtaaacttgtctttcttgtttttaaataccatgtaagagccccctcatatccttttcattatcaaacgtctttattttatctgatttcatgcgaagataaaagaagaatgtcgaaaataaaattttgtatccggtttcaattttcgactttcatcaaaaatccggaacagggtgcttttattggaggaaagtccggccatgaggcttcagcttttccggaaaaaatcccacccttttggggtgcaggcccatggtcacatttaccatacttttttcctgttttcctatgctatgctgtacttaaatattgcgccggcgatttggcttacatatggattttttcaaaaagggtgggactgctgtgaagatcgtttatgctgctacggaagaacagatggataagatcgcggaactggtccgccatatgtttacggaagtatttcctgattactttacggatgaggagatcatcgcattccagcgcgacagggtgcttgccctgtcggatgacctaacagaacaaatcggcactttaaaagcagggtatcagatgattgccagcctgcagacaatcatttctattttggaaacggaagagcataagcgggacgagcattacgccggcctgtttgaatttaataaatttacgcttgaacagtttggcttgcactttcctttttcgttttcccattttcagaagaagcatacggatacgtttagcatgtttaaaaaagcagccaatcgcctgcttgtgtaagaaataatgcccggaaaaccgggcattatttttttggggatttttacttcgcaagcacgcagccttattttttgacatgcgctttaaaccattggcggaactcctgttttgaatgctctccgacaatgcgtgcggcttctttgccgtttttgtaatggacgatcgtcggtgtcgctttgattttgtagtcatcccagccgctttcaaattcagtcaggttaaattccttcaaatcgatgcccatatctttcgcgagcggtgatacaacaggcgtagtccgtttgcaatgcgggcaggtcggcatgaaataataaacggtgaacgttttgccggattttaaatcatgattcaattcttttggcaaaataatattctggtaaagggggtcatccagctggtcgcgcgtttccgccgataatttgcccacactttttgcaggtgcatacgggttgtttttcgcctgcctggattgcttgtactttgtgattccggcaatcccgccaaaaacaatgagaacaatggccaaaaaaaggatgatttttttcattataatcctccagttgtgtttaatgagaagcgcgagcctgcttccaaacgatgagacttgaaataaaaatcagcacaaacgctgtgagagccaaaaaggggatggtgataaagccgaaccagttgatgtattccgacgtacaggggatgcggccgcatgcaggaagcctgtccgaaaaaaaggcaagtttttgcagacagtaatggtaaagtgacacacacatgccgattccggacaaaacagcggtataaagcgacatgcggtaatctttcctggcaacggcaatcccgatcaagaccgtcatcggatacatgagaatgcgctggtaccagcacagttcacacggttcataccctttaatttctgaaaaataaagactgccgagcgtggcaaccaccgaaaccgcccaggcaaaaaaccaaacctcttccctccgtcctctactcaaccccttacctccttttcatcaatcccttccttgtaaattatagtatccaacccaaaaaatgaaaagcggaggcgactgtttagccccggccggcgaagtttcggccggaatgaagcccctacttcatgacggacggattattcgaccctaggggctaggagccacagctggacaaagaaaagcggagggcgtttgcccgtggacggtgcaatcacttgtcgaatcagcccggcaagtttacaataaatgatgtctatcgttctgactttttgcatgattatgcattcaagggagggtctcaaatgaaaattgtttgtttcggggatagtattacaagaggtgtaacttgtataaaaggaaggctccggattttaaaagacaattatcccgcagtgcttcagcggtattttggcgacagcagcacagagattgtcaataaaggggtgttcaatgataattccgacctgcttgtccagcgtctcggcaaagatgtaatcggcgagcatcccgatgtcgtgctgatctgtattggcggtaatgattgcaatttcaaatggaacgaagtagcagagagaccagatgatacgcatgtcccggttgtgccccttgagcgttatgcggacaatatcaggcatttagtcaaaaatgtaaaagaacagggcattacgcccgttttgctaacgctgccgccgcttgacccgaaacgctactaccagtccatcagcgcccgctttgggaaaagcatcggccactggattggattgtcgggcggcattgaacactggcacggccaatataacaggtgcctgaaaaaattcatcaaacagttgaacgtcccggccattgatgttcggacagcgatcaaaaaagccggtgacctgaagggcctcatcagtgatgatggcatccatttaacagcagaaggttataaagtaatggcgaaaaaaatttatacggacttaactgcacaatttgccgggcaaaaagccgggagcggaatttaagaaatacaagcaggcaggaggggttcctggccggccgttccagagcgtcacagatgctgcccaccccttgcacaaaacaaaccaaccatatttgcgatcaagaaggccggtaccggcctttttgcaatgctgttaaaaatcatcttggtttaaatgaatttttaccgttttgtaatataaagtttgtataataggaaccgcagggtttcctgcatgaatattgattcattttgccgtgcagggggtatagaaaacgaaaggcgtcgacatcgcaatacttgctgtacaacaggaacggaggatggcagatgtcagcagcaaaaagaaattcgtattttgacaatgcaaaatttattctgatttatcttgtcgttctcgggcacctgatcagcccgtttaaaaccgaagacaatttcctctttacgctgtataccgtcattttcctgtttcatatgccggcatttattcttatttcaggctatttttcaaaagcataccgaaaaaaaggccatatttcaaaatcttttaaaaagattttggttccgtatttcatttttcaatgtatttattccgtttattattattatacaggcgaagaatcgcacctgacggtaaactttctggaaccgcactggacattatggtttttgctgagtttgtttttttggaaccttatgctccatttgtttgcccgtttccactttttcggtcttgcggctgcggcagcgctcggcattgggattggctactgggatgaggccggaagttttctgagcctctcccgcacattcgtattttttccgtattttttgctcggctttttgctggaaggaaggcatttgcaaaaaatccgcaatattccttacgcgccggtggctggcattttgatcctgtgtgccatcacgcttgcaaccggccagtttttcccgaaagatgccgtgccgtggctccttggcaatacttcttacgcaggcatggggatggaatactggtttagcgggctgatccggctggcccaatatgctgtcacgctgcttgttattctcgggttcttcctgttaatcccgagcaaagggtacaagtggacaaaaatcggcgagcgcacgctttatgtgtatttgctgcacggttttatcataaagacaatagaggcagccgcttcccccaatgtgcttgactggctggcggacaattacctgctgctgattgtcttttcacttggcatctgtttatttcttggcagttattatatccggaaatttacaaggccaattattgaactccggttgtaaaaaataaaacatctgaaaagtggcggaaaatcaaatgatttttcgccgcttttttggtatgccaccccccaggcataaaagccgtttttgcatggagcggggggctcgtgcttttttacatgtatttccgttgcacgcttcttccgtcataagagaagacaatcggcttttcttccacaaccgtttcgaggtggacatttctgccccataactggtaaaggtagggcagcactttttccaggtattttaaatcaagttcaatgccttcataccagtgtttaatatacaactccccgtttttccggtagtctccgtccgtgacggttaaataaggaaaaccgccgtttacgcgcatattgacaagctggtcacgtacatgctcccactctttgtccaccactttatagtcccgcccctgtttttggaacaagtacatatcttcccttgtagccagttctttcgtcaagtaattgcgcagaaatgaaatatcactttcaatttcgcgcacttcgaatattttttcgcgcccggtccctggccgtacaccccgttttttcatttcttccgtcgggttgttccagcgttcttcaatatcttcaaaaattttgatccccaaataatagggattgatgccagttttggatggctggacaacgctcgcattcagtttcgcatattcaattgcttcatccgtcgtcaaatcaagttcgcgcatgatccgctgatgccagaaagaggcccagccttcattcatgatttttgtctcgagctgcggccagaaatagagcatttcttcgcggatcatggtcataatgtcgcgctgccattccgtcaattcccggctgtattgttcaataaaaaggacaatatctttttctggctgcggcggaaactttctggtttttttcgccgctttctgtcccggctttttctcatcaagcgaccacaattcatcatacggcccttctttgcgtttcggttcttcatcccattcttccgcatcttccatggtccagttcaatttcggccgcatgagcgacggatcgatatgttcttcaattgccagcacggaatcaataaattgttccacttcctttttgccgtatttcagctcatatgcccggattctttccgccgttgcagacatgctctccaccatatcccgtttcgtattttgaaagcggacattgtttttgaaaaaatcgcaatgcgccaaaacatgcgccacaatcagcttattttggacaagcgtgttggaatccagcaaaaaggcgtagcacggatcagaattaatgacaagctcataaattttactcagcccgaggtcatactgtaacttcattttgaaaaactgcttgccgaaactccagtgcgaaaatctggtcggcatgccgtaagcgccaaaagtataaataatatccgccgggcagatttcgtagcgcatcgggtaaaaatcaagcccgaaaccggacgcgatttccgttatctcatcaatcgcatattgcaggctttcatgatcatgcatgaaatgttcctcccctttaaaagtcacccttttttccaatgtatgaacggaagggaaaaaacatgaggacacgaagaaggatttttcgcatgatccgcgaaatgaaaacatcctgcgcacgagcaggcaccgccatttccgggactgtgagatccaaatgattcgtccggctgcatggaagcttgccgcgggctgaaaaccggaaaaatacgttccaaatgataacagcctttcgtttcccgcaaggcaagtttttcaacgcgcaaaatcaataaaaacacatacaataatgctgactccttttattagggtttgctttttaataaagcaaatgcacaagaaagggggagccgggatgaatcccattgattatgaccgcgctttatattacacacaccgctcgcaatgggataatttgctgattttgatggtgcggacgaaagatgattttctttccaaaaaaattgagcatgttttacatgcttatcattattcgcatgattataacgtcattgaaagatgcctgtttgcattgcaccgctatattgatcatgccaacgaaatggcggaccggagcggggcggcggaaccgggttttctgtaccaaagcgggggccatgcctgaagaaggcgcctccgcttttttgcttccccattgtcctggtgcccggcttcattccgggcggatgcggggtattcagctgccctcatttcagccagccttttttgtaaaaccagtaagtcatgccgacgccgatcagaaacatcacaataagagtgacgaaatagccgtatttccattccagttcgggcatatatttgaaattcatgccgtacacccctgcaataaaagtcaaaggcataaaaatcgtggtgaaaatggtgagaatcttcattacccggttcgtttggtgcgagtttaaagacaaataactgtcacggatatcggtcgtaaactcacgattagactccaccatcccggatagttttagcaaatggtcatggatgtcatggaagtacgcgagctttttctgaatgccgggaaccgaatgggaattcagcatccggtagacaagatccgtcatcggcataattgtgttcctcaacacaagcaaatcatgccttgttgcatacaggcttgcaagcagttcctccatcgattcattttttgaattgtcttcaatttcattcagacggtcttctatcttatacaaataaggaaaataatgatcaacaatcttgtccagcacttcataaagaataatcgcaggcccccatctgcccggttcatccgtttttttcagtttatcccgcacttcgctgatttcttttgacgggagatggtgaaaggtcacggcaaaatgctccccgagaaacatgttcaattcttctttctgcagcctgttgggattaaggctttggaacacaaaaaagacatggtcttcgtaataattcagtttcggccgttgcagcttatgcatacagtcttcgatggccagcggatggaaaccgagcggattgcgcagttttaaaatttcttcttccgaaggctggtcgaaatcaatccaataccatttccagccgctcccttccaattcttcaatggaagccggggctttcagtacattttcttttgtcatcgccataatatgtatcataaacaggcacatccttttcacatggggtttgccaatcttccgtttagcattattttactatgtcgcagacggccttgcattaaatcaaaatgaaaggcggttcgcccgtccttttgccgggattacgggcgcaaaaaagatgggcatccgctgcgccgaaagcggcaagaacataaacgtcacggccatttatgccgggtccggcagaaaagccagccgcaaagacaggcgcccgtgctgttaaaacaagaaaaagcgaaaggatgatgaaaaatgaaaccggtgatcggtattacatgcagcgccaatcaaacttcccagtatttggccgatgactacatcaaggctgtccgcatggcgggcggcgtcccggtattgcttccggccggcggggaagaagacatccctttattattgtccaaaacggacggaatcctgctttccgggggaggggatgtagatccatcctggttcggggaagagccggttccagggctcggtgaaattgagcccggccgcgacgcatttgagattgcgctatgccggtttgtggtccaggcggatatgccgctttttgctatttgcaggggcatccagattctcgctgttgcatccggcggggatatgttccaggatatttatagccagggaaaacccccgctattacagcacaaacagcgggctgcccgttcacatctttcccacacggtccatgttttgccgggaagtttactggaaaagtgggcaaaaagcgcaacaattaaagtgaactccttccatcaccaggcagtccggaccgtgaaagcgccgcttgcggtttccggccgtgcgcctgacgggatcattgaagcggtggaaaatcgcaacgcccgttttatgcttggtgtccagtggcaccctgaagctttggccaccatacaggatcctgtttccttgaaccttttttccgcttttatcgcttcctgtaaaaacatttagtccgctttattgtaatcgcgctttccttatcgctttttgcaaaccggaaaaatttgcaggctcttgcttaactcctgacttctgccggtggcggacaagaaaaaaataaaagcgatttccatattccgaaaatattactattgtagaattaaaataaatattgaatgctattgaatttttcgcctatttagtatataaataaaaatataaacacaacagtatgcccattttaaacatgagaaggtgtctgcatatggcaaagtatgtactcaaaaggctcgccgccatggttgtcacactgtgggtgatcaccaccttgacttttatcatgatgcaggctattccgggatcgccttttaaccaggaacgcaacacatcggaagccgtgcaaagaaatatggaaacgcaataccatctggataagccggtttatatacagtatttgtattatgtgaaatccattgttttatttgattacggcccgtccatcaaacagccgtcccagacggtaaacgatatgctgggaagggggtttccggtttcatttgaacttggcatgacagcacttctggttgcggttttatccggcatcgtgcttggcgtttttgccgctttgaaccataacggcatcatcgactatctggcgatgaccattgccgtgcttggcatctcgattccgaacttcatcctggcaacgatgttaatccaggagtttgcggtcaatctgaaaatcctgccggctgcaacctggacatccccggcgcatatgatcctgccaactgccgccctggccgtcagcccgatggccattatcgcccgcctgacaaggtcaagcctattggaagtgctgacgcaggattacatcaaaaccgcccgtgcaaaagggctttctccaataaaaattatcatcaaacatgccctcagaaatgcgctgatgccggtgattaccattttagggacattgacggcgagcattttgacgggaagctttgtcattgaaaaaatattctccattccgggcatgggaaagtattttgtcgaaagcatcaataatcgggattatcctgtcatcatggggacaaccgtattttacagcatttttttgattatcatgctgtttctcgttgatattgcgtacggcattctcgatccgcggatcaagttacataaaaaggaacaatgagcactggttccgaaaagaagcagcccggctctgcatagagatagggcatcaggccccggcttttcgtaacatccggcgccaatggcctgcaaaatcatatttaaaaagagccatcgtcccgattccgcaaaatctggtgcataaaaatagagcagtaaggggtggacatcttgcaaatagccaatcaggataaagtggataccgtttcagagattccggatgaatggtttgtcccgaaaaagaaagaagccggaatgcaggaagccgttgtcaggccgggcatatcgtactggcatgatgtatggaaccggcttgccaaaaataagctggcgatgctcggccttgtggtgctgattcttttgatcattatggccatcatcggcccgctgattgcgcctgagagcgtgacgaagctgtcactgacgaaccagaatctgccgccttccaaggagcattggttcgggaccgaccagctcgggcgcgatatgttttcaagaacatggtatggcgcgcgtatttcactgtttgtcgggtttatggcggccatcattgaatttttcattggggtgatatacggcggcattgcgggttacaaaggcggccgcatcgaccagatgatgatgcggattattgaagtgctgtacggccttccttatctgcttgttgtgatcctgttgatggttgtgatggggccggggctcggcacgattattgttgcgcttaccgtaacgggctgggtcggtatggccagaattgtccgcggccaggtattgcagattaaaaactatgaatttgtaatggcctctaaaacgttcggcaccaaaacgtcacggattatccgcaaacatctgctccctaatacaatgggcccaattattgtccagatgacgctaaccgtgccaagtgccattttcagtgaagctttcctcagttttttaggattgggggttcaggcgccgcatgcgagctggggcgtgatggcggatgacgggttgtcagcgattttaacgggcgagtggtggcgcttatttttcccggcgttctttatttcgctgacgatgtttgcgtttaatgtgcttggcgacgggctgcaggatgcgctcgatccgaagctgaggaggtgacggaattgaacaagattctcgaagtggaagacctgcacgtttctttttcgacatacggcggaacggtgcaggccgtgcgcggggtgaacttttatttaaacaaaggcgagacgcttgccattgtcggtgaatccggatgcggcaaaagcgtgacatcgcaagcgatcctcaagcttcttcccaataccaatgtgaagaagttaagcggctcgatccgctttaaaggcacggatattttaaaatacagcgaaaagcaaatgcggaaaatgcgcggggcggaaatctccatgatcttccaggatccgatgacagggctgaacccgaccttgtccatcgggaaccagttgctcgaagcggtacaggagcatcaaaatctttcccgcgaggcagcgaaaaaaacggtcattgaaatgttgcacatggtcggcattccggacccgcacgaacggttaaaacaatatccgcaccagttcagcggcggaatgcgccagcggatcatgattgcgatggctttgatttgcaatccggagatcattatcgcggacgaaccgactactgctttggacgtcaccattcaggcacagatttttgaactgtttaagaaaatccagcgggagacgggcgtatccatcattttgatcacgcacgacctcggtgttgtggcccaggttgccgaccggattgcggtgatgtatgccggtaagattgccgaaaccggcacaagagaagaaattttttatcatccggaacacccttatacaaaagggttgctaaactcggttccaaggctcgatatggaagaggaagaacttattccgattcccggcacgccgccggatttgtttgcgccgcctcccggttgcccgtttacggcgagatgcccgatggcaatggaagtatgcagccgtgtggagccttttcgcgcgaaaaaatcagcttcccatcaggtttactgctggctgcaggacgaacgggccaaatttgcggtttcaactacgggtgtacgcctgtagatgaaatagaaagcaggcattgacggcgcccggatactgcaagggggacaaacgggtcagggctgcccgcaatgcggaaaagaaaagggggaaatgtatgaagaaattttggagtatggttatcagttttgcgcttattgcttcgcttgctgcctgtacgagccagtcaagctcaaaagacagcccgggcggaagcagcaaagaaaaggtattaaatttaaacaacgggtctgagcccacctcatttgacccgccaatcgggttcgattccgtttcatggaatgcactgaacaatttaatggaagggcttgtgcgccttggcaaagacaataagccgcaccctgcgattgcaaaaagctgggatgtcacaaatggaggcaagacgtatacattccacctccgggacaatgcaaaatggtcaaacggggatccggtgacagcgggtgattttgaatatgcgtggaaaagaatgctcgacccgaaaactgcttcgcctgccgcatttttaggatactttattgcaggcggggaggcgtataacaccggaaaaggatcaaaagacggcgtcaaagtgaaagcggccgatgacaaaacactggaagtcacgttaaccgggccgcagtcctattttctgaacgtcatcgcaaatcctgctttcttcccgattaacgagaaagtggccgaaaaaaatccgaaatggtttgcagaagcgaaaacgtatgtttcagacgggccatttaaactcacagaatggaaacacgatgaccatttcatcatggaaaaaaatgaaaactattgggatgccaaaaatgtaaaacttgataaagtgaaatgggcagaggttgacgatccgaacactgaatatcaaatgtaccaaaacggggaactggatgtttcagatgtcccggcagatatggcagcccggctgtttaaggaaggaaaagtgaaagtagaggatcaggccggcacctatttttaccggtttaatgtcaataaagaaccgttccagaataaaaatatccggaaagcattcgcaatggccattgaccagaagcaaattgtcaaatatgtcacgaaaaatgatgaaaaaccggcttacgggtttgtttcttacgggtttaccgaaccggacggcagcgacttccggaaaaaaggcggcaatttgtatacttcaaatgcaaaagaagcgaaaaccctcctgaaaaaaggaatgcaggaagaggggtatacaaaactgcctgaggtcaccctcacttacagcacggacccggtccataaaaaaattgcggaaacaatccaacagatgctaaaagaaaacctgggcatccatgtgaagcttgccaatatggaatggaatgtcttccaggctgagcagaaaaaattgaaattccaattgtcccgcagttcattcctggctgattacggggatccgattaacttcctcgaaagcttcacaaccgggcaagcgatgaacagaacaggatggagcaataagcaatatgaccaattgatccagcaagcaaaaaatgaaaccaatgaaacgaaacgttatgagttgatgcacgaggcagaaaaaattctcattgacgacatgccgatcttcccgctctatttttacaaccaggtatttttgcaaaaagatcatgtaacaggcatcgtccgccatcctgtcggctatcttgagctgaaatgggccaatgtaaaataatgctctgtttttggcagggggctgtttgcccgggaaagcatttggcgggcattgtccgcggcccggctgcccggacgaatggaaaagaataggcactatcagcggggaaactccccgcctgatactgccaaaaatagaaatctgagggaaagggggcggaacatgggaaagcaggtttatttggtggatacccctgtcgccaccgtttggacttccgcacaatcgccgggtgccggagacgaagaagccctccggaacccggcgaatatgaagcaatggctcaccggcctttcattggaacagcggcacgaactttggcgaaaaaataaaatccagacacaggtgctctacggccgaaaagtcattgtccataaaacagaggggaagtgggcgtatatttccgttccggaacagccttccagcaaacatccggacggctatcccggctgggtcccccgctgccagctgaggcagggagaagaatggccgcaagatactgctgtttgtgccattaaaaagccatttgcaatgctctatgatgaaaatcaactccctttatttgaagtgagctttcaaacacgcttttctgtagtgggtgaaacaaaggaccggttcgttgtaaaaacggtacgggggaaaacggcatcgcttaaaaaacaggatgtgcagttgaaggggagcagtcccggcagccagggcaggcatatgcttgacgccggaaaaatgtttctcggcctcccgtatttatggggcggcatgagcggatatggatatgactgctctggattttcctatacaatggtgcttgctgcaacaggcagggccattgcccgtgatgcccatgaacaggcaaaaggaggaacgaccgtcccgctcggaagcatcgtacctggcgatcttttattttttgcccatgaggaaggaaaaggcgtcatccaccatgtcggaatttatgcgggggaggggaagctgctccactcgccgaaaacaggccggcctgttgaactgctggatatggaaggaacgatttacgaaaaagaactatgcggtgcgcggcgttactggatgtaaagtcgcgcataagatgggaatccgcaacgcaacgggttgcgaaaggaatgcagcgcggcgttggtggccgggagtatgcggcaaaccggctgcaaaagcaatacgggttgcggcagccgggtgaagggagtgcgccatgatggaaaaactgttggaagtcaagcatgtcaaaaaatactttgagattggaaagaaacaatttttaaaagcagtggacgatcttacttttgatatttataaaggggaaacgttcgggcttgtcggggaatcgggatgcggaaagtcgacggcagggcggctgatgatggggatctacaccccaaccgaagggcaaatcctttatggcggaaaagatatccatgtactgaatgagcgggagcgttttctgatgaaaagaaatgtccaaatgatttttcaggatccgtatgcttccctgaatccccgttccactgtccgcgagatccttgctgaaccgcttgaagtccatggcatttttaaaaataaacgggaagagcttgaaagaatatatgaattgctcgaagaagtcgggctaaacagagagcatgcaggccggtacccgcatgaattcagcggggggcagcggcagcggatcgggattgcaagggcgctcgcgcttgacccggagtttgtgatttgcgatgagccgatttccgcactggatgtttctgtccaggcccaggttgtcaatgtattgaaaaaactgcaaagggaaaaaaatctcacctatttgtttattgcccatgatttatcgatggtaaagcatatcagcaaccggatcggcgtcatgtatctcggccatcttgttgaattgacggggagcaagagcctgtaccgcaaaccgctgcatccttacacggaagcgttgctgtcggccattccgattccggatccgaaaattgaagataaacgggaaagaattattttaaaaggggaaatcccaagcccggtcacgccgccgagcgggtgcgtattccggacaagatgcccgaaagcaatggacatatgtgctcgtgtaaaaccggaatggctggagattgaagaccgccattatgtcgcatgccatctttacgatgggaagggcagtccggcagcaaccgtttcttccggcgcaaatcaggttggaaaagtttgattgcttgaaaaggcatgcagctgcggcaagccggtggaacagcgggcgggcaatggtatgtagaagccgtacgaatggttttcttgtaagcgtttggaaaaaagaagccgggcccgtgcccaataaggccgggccccggttcttagaacaggtaagcggcaccgacaataatcaacagaataaacagcacaacaatcagcgcaaagctgttgccgtatccgccgccatagccaccgccatagccgccgtatccgccgtatccgcagccccaaaagcccatatttttcacctccgtctttccgtcgtgcaatgttaatgtatgcaagatggaaggcagaagtttggacgtttatcaaggaatagaaaaaaaagcattctgatccgggcggccctggcactgctttcctgcacgtccgccccggttttccgccagaatgcggccatgtttgccagtccgggattgttcgccggcaaacaagttttttgtctatttgaattgcttttcctacagtttttcccatgagcggtgccggtggcttattttacgacaagcacatccacatccgcattttttacaaggcttttgcttacacttccaatgaacaaactttttacagcattttttccgctgcttccggtaatgatgcagtctacattctcgttacgggcgaaatcaatgatgctgtcggccaccttgccttctaaaatatgggtatcggctttgaccccttttgcatccaataattcgcgggcatgattcatgacttcctccgcatcgttcaggatgaattgctgtgtggaaggttcatcaacaggcggcgggtcaaccgggtaaacccgcccgtccagccccggaacggaaatggttggcggcacgccgatgttttcatccggtaccggtgctgccacttcactttcctggttcacgtggacaacggataattttatatctcttaaggcaagggcaaatgaacaggccctgtccagcgctttccggctcccctccgagtcatcgtatgcaatagcaatatgctgatacatgtaccatcatcctctcatgtatggctttgaacaccctcttttctttacccggaacgagaagaaaaaaacggtttcagcatatttttttggttttaaagaactgcattttctacaggggtcattgatttttccggccattcataatatccttttgcttaagggccaatcagccgggtgtttgagatagcagtttcacagattggggaaagatgaggacatcgacagatatgaacaaattcaaaccttatatagataaattcagaccttatttctggggattttggaacggtttcaaaaaagtttggaaaagggcccatatgactcaaattatcattctggcagcctctctttcattgcttggctttttagctttttttgcttattacgcaaaaagcgcgaatgtcgggcagttaaaaaaagggctggaacagacgaccgttatttatgacaaagacggggacacagcaagcagaatttctgcaaaccgctcggaaggcgtatcgattaaaaaaatgccggaagacctgcaaaatgcggtggtagcaatcgaagaccaccgtttctacaaacaccatgggtttgatatcatcggtaccttgagcgctcttttaaaagatatccggatcggcggggcggctgccgggggaagcaccattacccagcaattaacgaaaaatgcgctactttccccggaacggacattaaaaaggaaaattcaggagctttttttggcgattgaaattgagaagcattacacaaaaaaagaaattttggaaatgtatttaaaccaggtctatttcggggaaggcgcttggggtgttgaaaaagcggccaataaatattttggaaaagacgtggaagatctggacttatccgaatcggcaactttggcgggccttgttaattcaccgaatgcactcgacccgtaccgccattataaccgtgccattcaccgccgcaatgtcgtgcttttcgcaatgaaagagtacgggatgatcacgaaatcccagtatgaacaggcaaaaagcgaaaagcttgcgctaaaagataaaaaaacagatgcgctgacgggcaaatacccatattacgtcgatgcggtgctggacgaggcaatcgatcaatatggcctgacacaggaagagatcttaacaagagggtataaaatttatacggcaatggatcaaaatattcaaacggcattggaaaatgtttaccggcaatcatcactctttccgtccggcacatccggccagatcatccaaagcggggcaatccttgtagatccgtcaaccggcggcgtccgcggtcttgtcgggggaaggggagaaaaagtattccgcggcttcaacagggcaacgcagctgaaacggcagcctggatcgatcatgaagccgattaccgtctatacgccggcgcttgaagaagggtacaaccccgaatcgatgctgcaagatagagtaatgacgtttaaaggcggttatgcgccgaaaaactataacaaccaatatctcggtaaagtgccgatgtacatggctgtcgaaaaatcgctcaatcttcctgccgtctggctgttgaataaaatcggggtggaaaaagggtacgaatcggcgaaaaaattcggcatcccggtcaccaagaaggacaagcagctcggcattgcgctcgggaatattcaaaacggcgtttcccccgaagacattgccgaagcctacaccacgtttccaaacaatgggaaacggtcggaagtgcatatcattacaaaaatcgtgagcccgaccggaaaagttttggtagcatataaagacaagcaggaaagggtcatatcgaaaaaagtttcccaggaaatgacatccatgctgctgaatgttgtggaatccggaaccggcaaaggggtagcggtccccggttataaaattgccggaaaaacaggctccacccaattgccgttcagcggggttgacggtacaatggaccaatggtttgcgggctatacgcctaatcttgtcggggtggtctggatgggatatgaccatacagaccggaaccattatttatacggcctgagcgaacagggcattgtgccggttttcaacagcgtgatgaatgccacgctaaaatatacaaagccgggtgacctcggggtggaatctatcaatgaccagaaggaaaacggcaacccgttaaaagaaaaactgcaaaacatcgatgaaacgataaaagaacaagctgataaattgcagaaaaaaatcgaggataaccagggattctggaaaggtgcagcagataagttgaaagagcagctgaaaggaattcttggccagtaaacatactcatttataaagccggaatgtctttcaatcagggggaggcgtttcggctttaattgttgattgcctttcaaaaaggttgcgggggactgcatgctttcccccgtatgctgcttcattccgcaacctgggagagtgaaaagcacttgaagaacggacatttgtcctataaaataaaactgaaaaataagaaaataattggatgctggcccggttggaacttgacccggcaaaaatgaggctgttgtatggtttctttgatttttatttaaaactgaacgaagaagaggaggcggaagtaatgaaaacattaaaatgctggacacggacgaagcagaacaagtactgaagctgccaaattcctactttgaccgcgggtataggaagggaaaagaggaaggaaagaagagagaaaaacgattgttgccaggatgctcaagaatggcctggaactacaattgattgttaaaatgaccgacctgagccggacagaagtggaaaaaataaaacagcaactggagcattcctaaggcgcaacacaatgcagcgggaatctgaaaaattcccgctttttaacaggagctgtccatgaaatttatcgcaaggcaagataggaaatcaagtttaaaacaaacggggccatcacgatgcccaaagcgatggcaacgattgctataggcaaatattgttttttcataaacccgttcataaattccccacccttagctgtttaatcctctcttacaggtagcatccacagccggtttttgcaagcctccatccatgttttttcattttttcgaacccgctttgccggatgcagggagcgggacaagtcaaggcaaagaatagatgtccgcgcgcggcggcccctccagtttggatttcttcagttttccttgctcaaccaattccctgatggccttctctatttcacgagggtccgtgtcaaataaatcggccagcttgacagcagacagtgcagtatatttcggttcttttgtggatgatatgatcatgtttttgattcgttcatacaatttcgcttgttccatggtttaatccccttttttaaaaatctgcttttattatgcacaaaacggcaaagaaacaatcccaaagcagttatagaagaaagccaattggcaatcctaataaaaaaggcatgaaatgggggccgatgatggaagaaacaaccttttcgattcgaataaacgggcaagaactggcggctcgtaaagggcaaacgattttggaagtggccaatgcccacgatatatacatccccgccatctgttaccacccgaatctcggatcaattcaaacttgtgatacctgttttgtgaacgtggacgggaatttggtacgggcatgtgcaaccaaggcaaagccgggaatggacgtggagtccgtttccaaacctgtaaaagatgcccaatatgaagcaatgtcacggattctgaaaaaccacgagctttattgcactgtgtgtgacaacaataatggcaattgcgttgtccataacacggccgagcatcttgaaatcgagcatcagaaataccagtttgaagccaaaccctacccgccggaccaatcccatcctttttaccgctatgaaccggaccagtgcattctttgcggaaggtgtgtggaggcctgccaggatctgcaagtcaatgaaacattgacgattgactgggaccgggaagtgccaagagtgatctgggatcaggatgttcccattgatgagtcctcatgtgtatcttgcggccattgcgtcacggtctgcccgtgcaatgcgcttatggaaaagtccatgctcggggaagcagggtatttaaccggcatcccgccaaaagtgctggagccgatgattgatctcacaaaagaagtcgaaccggggtataaagaaattttcgccatatccgaaatggagtcggcgatgcggaaatcgagaatcaaaagaacgaaaacagtttgtacctattgcggggtcggctgcagttttgaaatttggacaaaagggcgccatattttaaaagttgagccgcaggaacatgcgccggtaaacggcatctcgacatgtatcaaaggaaagttcgggtgggacttcgtcaacagcgaagagcgtttgacaaagccgcttatccgcaaaggggaagaatttgttgaagcaagctgggatgaagccctgaatctgatcgcaagcaaattgcaggaaataaaagaacagcacgggccggacgcgcttggctttatcgcttcatccaaatgttcgaacgaagaaaactatctctttcaaaaattcgcccgcgcgatcatcggtaccaataatttggataattgctcgcgttactgccagtcgccggcaacgtcagggctcttgcggaccgtaggcatcggcggggactccggcaccatccgggatatccagcaggcggatttggtggttacggtgggcgcgaatccggccgaatcccatcctgtccttgcgacacgcataaaacgggcgcacaaattgcacgggcaaaaacttatggtcgtcgatttaagggaaaacgaactggccagccgcgccaatttatttatccattcgaagccaagcacggatttgatttggattaacgctgtgacaaaatacattctcgatcagggctgggaagacaaagcatttcttgaagccagggtcaaagggttagaccggttcagagcttcactggaaaaatacacgctggcatttgccgaagaaaaaaccggcatttccaaagagaacttaatcaaaatggcaacgatgatccatgaagccaaatccgtttgcattctttgggcgatgggcatcacccagcacatatgcgggactgatacaagcacggccatttccaacttgttgctggttaccggcaattacggccgccctgggacgggggcatatccgctcagagggcacaataatgtgcaaggcgcctgtgattttggaacgatgcccgcctggttcccgggctacgaaccggtagaagataaagaagtaagggaacgatacgaaaaagcttggggggttaaacttccggaaaacccggggcttgacaatcatcaaatgatcggcggggtagaaagcggaaagctccgggggctctatctgttcggtgaagaaatggcgatcgttgattccaatattaattttgtggaagaacatctggaaaagctcgacttttttgttgtgcaagatatgtttttcagcaaaacggcccaatttgccgatgtgatcctgccggctgcgccgagccttgagaaagaaggaacgtttaccaatacggaacggcgcatccagcgcttttaccaggtatttgaaccgatgggcgaatcgaagccggattgggtcatcttccaggagctcgcgaacaaaatgggtgcccagtggcattaccagcatcccggcgaaatcatggcggaagcggcaagcctggcaaagtactttgccggcatcagctacgagagactggaaggctttaacagccaaatttggccggttaaaaaagacggtacgagcacgccgcttctgtatcaagaccgttttgcctttccggacggcaaagcccggcttgtgccggttgactgggaaccgcctttttcagccggagagggattcgattaccatcttaacaatggccgcctgctagaacagttccatgaaggaaatttgacggaccgttccccgggcattcatcacaaagtgccggagccgtggcttgaaatttcaccggatgcggcggaagaacgggggataaaagacggggcgcttgtacggctgacatcgccttacggaaaggtgaaagtgcgggctgttgtgaccgggcgggttcaaggaaaagaattgtacttaacgatgaacgcccggaaagagaatgaaatggtgaaccggctgacgagcagctatcatgaccgggtgacccataccccgaactacaaagaaataggcgtaaaaatggagattttggaagaaaaaggaaaaacgccgctgccaaaggtgaaccaccgttacggcaaccggattccgcaaatcagtgtaagagtggaagaaaaatggaagcgggatgactttatcccgatcacggcactattttcaccgggaggaaaagcagatggcgaaggtgaccaggcaaacgggacgggccggtaatcggaaagaataccgcgggcgggaaggctctgtcccggccgtgaaattaataaagccgggagggaaagcgtatggcgaaggcgatcaggcaaattaaacaagtggatccgaccccagaagaatggcaggcagcgtctatgtcggcggttgtaaaggcagccgctgaaaacggggaatcactgattaaattgttggagatcatcaaacagctggatggcatgggcgtgctcaacgcgatggaaggcctgctccaaaaccgcgttgatgttgccgaaattgctttagggcaactgaaccagcccgccatgtaccatgccatcaaaaacgggatgaacgtatttaaatttttaggttccatcgatccggaacaactgcaaacgatcctggcaggcatcacgagcggatttgaaaaagcagctcaatccggggggcaggagagcctgtggaagttgggaaaaagcatgcgctccccggaagtgaaacggtcgcttgctatgatggctggcgttttggcggggatgggggaagccatggagcaaaaccattcgcttcctaaaggaggaaccgacattggctaaagggatgttgaaagtaagtgatatggtaaatgaagaagatgccgccaaagtccgacgcgccctgaatgaagtctggggcgtccgcgaaattgaaataagcttggcaagaaaagaagcgacgtttacctataatgaccaatcggcatcctgccacgacatggtgcaagccgtgacggagcagggataccgtgccgaaatgatggaaccataaaaggaggaaggcacttgaaagtatgcgaaatctgcggttcccaaacaccggaagaaaacgaagcggaatcaagaagagtgctttatgtctgtgaaaactgccggaccgaccggaaattcgattttgaagatgaaaattaagcaaatggcgttgcggcatcgcaacgccatttatatgcgcatattttccgaaaaaatagcgcctttattgccggctgcccatatccccgaaagcatgggacttcttgcgtatgtgtaaaattttacaataaaactgaaaaataagaaaaggagtgagcgatttgccattggaactggtaatggaaaaacaggccggttacaacgtgcatgaccgtttgtttaaggagctgatccaaaacttttttaaggaatttatggaagcgttcttcccggatgtgtcagcggatcttgactaccgccgggtgaggtttttgtcgcaggaacagtttacggactttccgggcggcgaacaaaaacgggttgacatccttgccgaaacgaaggtaaaaggcaaagacaccgtgattctcatccatgtagagccccagtcgtattaccagaaactttttcctgagcgactatttcgctattacatgatgatcagcctcaggcatcggaaaccagtattgccgattgccgtattcagttatgaggagaaaacagagacccccgatacgtacacctttgccttccacaacatcgaaattcttcgttttcactatttatccattcatctgattaagaaaaactggagagattatatccggagcaacaatcccgttgccgcagcattgctgagcaaaatggggtatacaaaaaaagagcgggtgcaggtcaaactggagtttctgcggatgctggcccggatggaactcgaccctgcaaaaatgaggctgttatatggtttctttgatttttatttaaaactgaatgaaaaagaggaggcggaagtaatggaaaacattaaaatgctggatccggatgaagcagagcaagtattgaagctgccgaattcttactttgaccgcgggtataggaagggaaaagaagaagggaaaaacttgacacatacacttcttgccattgcatatactaaaacacaaaaatgttgtaaaataaaaaacaaaagcaagagaagccttctatcattgccaaggggggaatgttatggatcttcaagtcggattgtggcaaaagcaatcaatgaaactggcaatgacccaggaattaaagcaagcaatagaggttcttcagttctcgtcccaggagctcgcatcttttttggaagaaaaagctgcagaaaatcctctcatcgaactgtccagcaccaatattaaactggtcgattcccgtttttccggcttgagccgtgcaaagggccagaaaaaaagccaggacaaaaactggattgaacaaattcctgcacagacggaaacactcccggattttttgatcagccaattggatatgaaagcgttgccaaacgcaatcgtgaaagcggtccaactttatgcgcgccatcttgatgcaaacggttatattacaatccaggttcaggaagcggcaaaaatggctgccatttccgaagaagatgccgaaaaagcgcttggcattctccagtcgctggatccggccggaatcggcgcaagatcgcttcaggaatgcctgctgatccagataaaaagggatccggatgcgcccggtcatgcggaagaattgatcagtcgccattttctcgattttgccgaaaaaaaatggagaggcattgcgaaaaaactcgatatctccctgcaggaaattcagcgggtatctgattatgtgcagacattaaacccgcgtccgggatccggttttatggcggatcggccgcaatacatcgttcctgatcttttggtcaaaaatcacgcgggaaagctcgaattgtatcttgtagaaaaccaggttccaaagctccgcttgaatgaaagctatgcaagtatgaatccgtccggagatgccagcgtcacccgctatttaaaagaaaaaacgcaggaatactactggatccgaaaaagcatcgaaagccggaaagaaacgctgctgaaagtcggcgcagcactgcttgaaaaacagcgggatttctttttatatggaaaagggcatttaaagccgcttacgatgaaagaaatttcagatgaaatcgggatgcatgagtcgacagtgagccgcgcagtgagggaaaagtatatggaaacgccgtttgggacttttccattgaaaacatttttcacgaccgccttgccggtccgttctcctggcggggaagaagcggcatcgagcgccgaagtcaaaaatgaaatttcagcacttgtaagcggggaagacaaacggaagccgctttccgaccaggcgattgtggccgtattaaatgaaaaagggtttgaaatctcgcgccggacagtggcaaaataccgcgaacagctcggcattccgtcatcttccaaaagaaaaaggtacgaataagccgggaatattttttcaaaacggaagttgcgcgtttcgtccgccggcaaaaaagggtgaaccggacgggaacgggcaaacgcgcgccttgcgaaaacaaataactgaacggggcatttaaaaccattcctgtttgtttatatcaggagcacagcccatgttcctgccacgagtggccggaaggggagatgattttaaaatggaactggtgctatatacaagaaaacaatgcccgctttgtgcggaagcaaaagaacagctgcaatgcctgcaaagggaaatcccgtttcggctgattgaaaaagacatcgaagcatgcgatgcgtggacggaaaaatacggccttatgatcccggttgtcgagtataaaggggaaatgctcggatatgggcggattcacatttttgccataaaggagcgcttacatgaaattcatgagcaataatagttgaaatgcaaaatttatcctgctagaatgaaatatgtagcgagggtaattttttttgaagcatgtgggacaaaaaatgtctctatgggactcaacacgacctacataattatttaagggagtacatcatctatgcgatcgttgatagaggttcaaaaaaaattataccccgatatcctcgctgtcatgcaaaaacggtaccggatcctccgttccatttcttttgcggagccggtcggaagaagaacattggcgcaaatgctcggcatgtcagaacgcgtactgaggagcgagacggattttttaaaaaatcaaaagctcatcgacgtaaaatcttcaggcatgtcggtgacaattgacggtgctgccttgttacaaaatatggaaagcatgatgagagaaatatcgggtataaatgaaacggaagaaaagctgaaacaagctttgggcctcgaagacgtggtcgtggttcaaggggacagcgataaagaaccgtgggtgaaaaatgagcttggaagggcttgtgctgtaagaatgaaagccgccttaacgggaaacaatataatcgctgtaaccggaggatcgacgatggccgcagtcgcagatgtattaactcccgatatcagtgccaagaggcagctgctgttcgtgccggccagaggcgggatcggtgaagatgtcgcaaaccaggccaacacgatctgcgcaaaaatggcggaaaggaccggcggaaaacacagggtattatatgtgcctgaccaggtcagcccggaagtgtacaaatcggtcgtaaatgagccgtccattaaagaagttcttacccttattaaacaagcggatattgtgctgcacggcattggcgaagccatgacgatggcagagcgccgcaagaccggaaaagaagagatggagaaaatcatccgcgggcatgcagtcggcgaagcgttcgggtactattttaatgaacatggtgaaattgttcacaaggtccggacgatcggcctgcaacttgaagatttacaccagatccgccatatttttgcggttgccggcggggcatccaaggcaaaggccattaaagcctacatgaacacgaagccggaatccactgttctgattacggacgaaggggcggcaaaacaaattctcgcttggcgctaacctgtttttaaaagggataacccttttgaaatataaagtttttacgactaaaggaggaaatacaaatggcagttaaagttggtattaacggatttggacgtatcggacgtaacgtattccgtgctgctctaggcaatcctaatgttgaaatcgtcgcaatcaatgacctgacagatgcaaaaatgcttgcacacttgttaaaatatgactcagttcatggcaacctcgaagaagaagtcactgttgacggtgattccattgttgtagacggccataaagtaaaagttttggctgaacgcgaacctgcaaatctcggatggggcgacctcggtgttgacgttgttgttgaatccacaggccgtttcacaaaccgtgaaggggctgcgaaacaccttgaagcaggcgcaaagaaagtcgtcatttccgctcctggcaaaaacgaagatattacgatcgtaatgggcgttaacgaaggaaaatacgatcctaaaaatcatcacgttatttcgaacgcatcctgcacaacaaactgcctggcgccgtttgcaaaagtgctgcatgaaaaattcgaaatcaaacgcggtatgatgacaactgttcactcttacacaaacgaccagcaaattcttgacttgccgcacaaagactaccgccgtgcgcgtgcagctgcacaaagcatcatcccgaccacaaccggtgctgccaaagcagttgcacttgtattgcctgaactgaaaggcaaattgaacggtatggctatgcgcgttccgactccaaacgtttctgttgttgaccttgttgctgaacttggcaaaaacgtaacggttgaagaagtaaacgcagcattgaaagaagcggctgaaggcgaattgaaaggcatcctcgcttacagcgaagaaccgcttgtatcccgtgactacaaccatacaactgtttcttcgaccattgatgcattatccacaatggttatcgaaggcaacatggtgaaagtcatttcctggtatgacaacgaattcggttattccaaccgcgttgttgaccttgttgaatacatcgcttctaaaggcctttaatttgaacgataaaacgttgcaaggggggtggggaagaatcccctctcccttttttcaatgcctgtaaaacaaaaggaggttcgttttgccatgaacaaaaaatcgattaaagatgttgaattgcaaggcaaacgcgttttctgccgcgtcgacttcaatgttccgttaaaagacggcaatgtaacggatgacacaaggatccgcgctgcccttccaacgatcaaatatttggtggaaaacggcgcgaaagtcattcttgccagccacctcggccgtcctaagggccaggttgttgaagaactgcgcctcacgccggttgcaaaacgcctgagtgaactgcttggaaaagacgtcaaaaaagcaaatgaagcttacggcgaatcggttaaggcggaaatcagcaaaatgaataatggcgacatattgttgcttgaaaacgtccgtttctacccgggtgaagaaaaaaatgacccggaactggcaaaggaatttgcatctttggctgagctgtatgtaaacgacgcattcggcgctgcccaccgtgcccatgcatcaacagaagggattgcccatcacttgcctgcagtatccggctttttaatgcaaaaagaactggatgtgctcggcaaagcattgtccaatccggaacgcccttttactgccattatcggcggcgcgaaagtcaaagacaaaatcggcgtcatcgacaatttgctggataaagtcgacaacctgatcatcggcggcggccttgcttatacgttcgtcaaagcaaaaggtcatgaaatcggcaaatcgctgcttgaagaagacaaaattgatcttgcaaattcttttatggcaaaggcgaaagaaaaaggcgtcaacttctatatgccggttgatgcggtcgtagcagacgaattctccgaaacggccaacaaaaaagaagtagcaattgaagaaattccggctgactggcaggcacttgacatcggcccgaaaacggttgaactgtatgccaaagtcatcaaagaatcgaaactcgtcatttggaacggaccgatgggcgtattcgaaatggacgcgtatgccaacgggacaaaaggcgttgcagaagcgctcgcggctgcaaccggcacttacagcatcatcggcggcggcgactctgcggcagctgttgaaaaattccatctggcagaaaaaatggaccatatttcaacgggcggcggcgcatcgcttgaatttatggaagggaaaacacttcctggcgtcgcagctttaaatgacaaataattttatcaggaaagggagtgtccttattgcgtaaaccgatcattgcggggaactggaaaatgaataaaaccttgccggaagcgctggcttttgtcgaagaggtaaaacattcggtacctggcgaatctgttgtcgacagcgtcatctgtgcgcctgcgctctttttggaacgcctggtggaagcaacaaaaggcacccgcgtaaaaattggcgcccaaaacatgcactatgaagaaagcggtgcttttacaggcgagatcagcccggttgcactcgcggatttgcatgttgaatatgtcatcctgggacactctgaacgccgtgaaatgtttaatgaaacggatgaagcagtcaataagaaagtgaaagctgcttttgcccatcatttaacaccaatcgtatgcgtgggagaaacactggcacaacgggaaaacaatgaaacaaaacaaatcgtcggctcacaggtaaaagctgctttttccgggctttccggcgacgaggcaaaacaggttgtcgttgcctatgaaccaatctgggcaatcggaacaggcaaatcttcgactgccgaagatgccaacgaagtttgtgcctatatccgcagtgccatcgcggaccaattcagccaggatgttgctgacagtgtccgaattcaatacggcggcagtgtaaaacccggcaacattaaagaattcatggaacaaccagatattgacggtgcattagtgggcggcgcaagccttgacccgcaatcttatttgcaattattggaggcggtaagccatgagtaaagcacctgtagcattaatcatcttagacggcttcggctgccggaaagaaacatacggcaatgctgtagcccaagcaaaaaaaccaaattttgaccgttactggaaagagttcccgcacaatcagctcagcgcaagcggcgaatccgtcggccttcctgatggccagatggggaactcggaagtcggccatacaaacatcggtgcagggcgtatcgtttaccaaaatctgacgcgcgtagacatgtcgatcaaagaaggcgagtttgaaaagaacgaaactttcctcggcgcggttgaaaatgtgaaaaaacacgggacaagcctccacttattcggcttgttgtcggacggcggcgtgcacagccatatccgccatatgttcgcactgttgaaattcgcagccgatcaaggtgtgaaaaaagtctacgtccatgcattccttgatggccgtgacgtgggcccgaaaacagcggaaaaatatatcaaagcaacggaagaaaaatttaaagagtacggcgttggcgaatttgcaacgattaccggccgttactattccatggaccgtgacaagcgctgggaccgtgtggaaaaagcgtaccgtgccatggtatacggcgaaggcccgaaatatccgaacccaatggcggtgattgaagattcctataaaaacgggatctttgatgaattcgttattccttctgtgattacaaaagaagacggctcaccggtggcaacggttcaggaccatgattcggtcattttctacaacttccgcccggaccgtgccatccaaatttcaaatgcttttacgaatgaagattaccgtgcatttgaccgcggcccgaatcatccgaaagatttgtacttcgtctgcatgacacatttttcggaaacggtcaaaggctatgttgccttcaaaccggtcagccttgacaatacaatcggcgaagtattggcacagcacgggttaaaacagctgcggattgcagaaactgaaaaatatccgcatgtgacgttctttatgaacggcgggcgtgaagaaccatttccgggggaagaaagaattttaatccattcccctaaagtggcaacatatgacttgaaaccggaaatgagcgcctatgaagtaacggatgctttgctggagcaaatccggaatgacaaacaagatgccatcattttgaactttgcaaacccggatatggttggccactccggcaagctggaaccaaccattaaagcgatcgaagctgtcgatgaatgcctcggcaaagtagtggacctgatccttgaaaaaggcggctatgccattatcacggctgaccacggtaactcggatgaagtgctgacaccggaaggcaagccgatgacagcccatacgacaaatccggttccggtcatcatcacgaaaaaaggcgttgaagtgcgtgacggcggcatccttgccgacctggcaccgaccatgcttgatctgttgaacattgaaaaaccgaaagaaatgacaggcacaagcctgattaaaaaatgaccctgggaagcctgataaaaggaaaatccggccaaatgcggtgaaagtgacgccctgaaaacgggagcgccatgcctgaatggtgcttggggcatggaaaaggatgacacccgggggcatgccgggaaaatttgccgcggatatgcccttagcgccatgcctggaaagtaccgctttgtacgatttgaatgacgaatggtgcaatgaatatctgcaaaaagcatctgaatgagctaaaggctcaatcagtagtggtgttggacacgccaacagtgtatacgttcaacggacatctgttcattgcgtagaactggaaacttgccattttaatagcgggtagttcacaaagtgatgaaaacccccatttatgcattgaaaaaggagagataagaagatgtctttaatatctgatgtttatgcacgcgaagtattggattcgcgcggcaacccaactgttgaagtagaagtttacacagaagacggcggtttcggccgcgcattggtgccaagcggtgcctctacaggtgaatacgaagctgttgaactccgtgacaacgacaaaagccgtttcctcggtaaaggtgtcgaaacagctgttaaaaatgtaaacgacacgatcgctgaagccattatcggccgttacgatgtgtttgaccaagtcggcattgacaaagcaatgatcgaactggacggcacaccgaacaaaggcaaacttggcgcaaatgccatccttggcgtttcccttgctgttgcccgtgctgcagcaaacgaattggatttgcctttgtacaaataccttggtggattcaacgcaaaacaactgcctgttccaatgatgaacatcttaaacggcggtgcgcatgctgacaacaacgtggacattcaagaattcatgatcatgcctgccggcgcttcgactttcaaagaagcgttgcgtatgggtgctgaaattttccacaacctgcgttctgttttgaaagcaaaaggttataatactgctgtcggggacgaaggcggttttgcaccaaacttgaaatcgaatgaagaagccctttctaccattattgaagccatcgaaaaagccggctacaaaccaggcgaacaagttttgcttgcaatggacgttgcatcttccgaaatttacagcgacgaagaccataaataccatttagccggcgaaggcaaagttttgactgctgaagaaatggtcaactggtatgaagaattaatttcgaaatacccaatcatctccattgaagacggtttggatgaaaatgactgggaaggcttcaaaatgttaacagaacgccttggcaagaaagtccaattggtgggcgacgacctgttcgtaaccaatactgaaaaacttgcccgtggtattgaagaaggcattagcaactccattttgatcaaagtaaaccaaattggtactttgacggaaactttcaatgcgattgaaatggcaaaacgtgcaggctatactgcaattgtttcccaccgttctggcgaaacagaagacagcaccattgcggacatcgccgttgcaacaaatgccggccaaatcaaaacaggtgcgccatcccgtaccgaccgcgtagcaaaatacaaccaattgctccgcatcgaagacgaactggctgaaacagccgagttccttggcaaaaaaactttctacaacttgaaaaaataattggttttggtacgctgcccggtgagagccgggcagtttttgattgtatgggaaaacccggaacccaaaaaacgtccttcatcaccggacccctaaaagacaaaacgggggccggatcagaaagacgctgttccttttcggacaattgttccgtatgtgtaaaatttnnnnnnnnnnnnnnnnnnnnnnnnnnnnnnnnnnnnnnnnnnnnnnnnnnnnnnnnnnnnnnnnnnnnnnnnnnnnnnnnnnnnnnnnnnnnnnnnnnnnactcctgcgggaaaagcgagccaggagagaccccgcagcgaggtacgagcgaggaggctcgctggccgcccgcggaaagcgagtgaatttcgcgcgcctcaacatccccgttatccatctttatacggaaatattacatcttttccgaaaattacaccgagcaagtaaagcacggtagccgaaagtgtacaaaaagagtgtcttggaatacccgatatttaaaccttgtcgagaaaaacttgacacatacaattgttccaatgtagttgaaccccgctccccaatatggtacactcaagattaggtattgcccgtctcaggaggtgtgcagttgtgcatacattgttattaacgttactaatcatcgattcaattctgttgattgcagtcattctgctccagccggggaaaagcacgggattgtccggcgccctttccggcggtgctgaacagcttttcgggaaacaaaaagtgcgcggtattgacctgatcttacacaggattacgattgtgctcgctgttttatttttcctgctggccatcggacttgcatatgtaaacctataagggtatgcaaatcaggcaacttttcagaagccttatccgcacatgcctgtaaactttaagacacccatcccggtcccaaaatccaggccgggtatttttatgcggattgctggcaattccgaaacgtctttgttacaaataaaatgaacaaaggcccaaagaaaaacagcaggaaagaggcgttttttacggatgatgagaattgtaccacccaaaccgtttttatttgaagccggcaagagggctgtactgcttttgcacggatttaccggaagcagcgccgatgtcaggatgctcgggcgcttccttgaaaaaaaaggatacacttgccatgcgccgcaatataaagggcatggggtaccgcctgaaaatcttttgcatacgggcccaagcgactggtggcaggatgtcatgaacggctaccagttattgaaagaaaaagggtatcatgaaattgcagtggccggattgtcactgggcggggtattttccttaaaattaggttacactgtacctgtaaagggaattatcaccatgtgcgcgcccatgtacataaaaagcgagcaaacgatgtatgaaggcgtggttgcgtatgcccgcaaatataaacagttcgaagggaaaagcgaagcgcagatcgaacaggaaatgcgggaatttaaaaaaacgccgatgcatacgctgcaatcgctgcaagagcttattcaggatgtgcgcaaccatgtcgatcacatttatgcgcctgtttttgttgtacaagcgcgccatgatgaaatgatccgcccggaaagcgccaatattatttattcagaagtggaaacagaccataagcaactcaaatggtatgagaactccggccatgtcattacactcgatggcgaaaaagaccaacttcacgaagatgtatacacatttctggagtcgcttgactggtcggtttaaaattttcccgaaaaaggagggaaataaatggaacaagaccaactacagcaagatgttgaaaaaattttatcatatatgaaagaagagacgtacaagccgctgacggttcaggaactggaaaaagcgttcggcattgacgattcttccgagttcaaagcatttgtaaaagtgctcgtttatatggaggaaaagggcctcattgtccgcacgcgaagcaaccgttacggcctgccggaaaaaatgaatctcgtacgcgggaaactgatcggccacccgaaaggctttgcttttgtcgcacccgatgaacccgggatggacgacatttttatcccgccgcatgaaacgaaccatgcattaaatggagacaccgttattgtccgtgtgtccaccaaaagctcaggccagcgccaggaaggaaccgttgtgcgcattcttgagcgcggccagacagaacttgtcggcacatacgtcgaaagcaaacatttcggatttgtcgtacccgatgacaaacggttcggcagcgatatttttattccgaaaacagcaaacggcggtgctgtcgaaggccataaagtgattgtccatattaccgcctatccggaaggcacgaaaaatgcggaaggcgaaatcatcaaaattctcggccataaaaatgatcccggtgtcgatattttgtcgattatccatcagtacgggctgccccaggcatttccggatgaagtgctcgaacaggcaaaccgggtgccggaagtaattgatgagaacgagattggcagccgccgtgatttgcgcggggaaatgattgtaacgattgacggggccgatgcaaaagacctcgatgatgccgttaccgtgaaaaaactggcaaacggccattacaagctcggcgtccatatcgcagatgttagccattatgtacgggaaggatcaccgattgaccgtgaagcatttgaacgcgggacgagcgtgtaccttgttgaccgcgtcatcccgatgatcccgcaccgtttatcaaacggcatctgttccctgaatccgcaagtcaaccggtttacgctgtcatgcgaaatggaaattgatgaaacaggccacgttgtccatcatgaaatttttgaaagcatcatcaaaacgaccgcgcggatgacgtatgcggacgttaacaaaatccttgttgaccgcgacgaagcgctcagaaaacattatgaaccactcgttccaatgtttgagcaaatggccgaacttgcggagattttgcgcaaaaaaaggatggagcgcggcgccattgattttgattttaaagaagcaaaagtcattgtcgataaaaatggcaaaccgacggatgttgtgctgcgggagcggtcggttgcggaaaaactgatcgaagaatttatgctcgctgccaacgaaacggttgccgaacatttttactggctggacgtgccctttatttatcggatccacgaagagccgaaagcggagaaactgcagcggttctttgaatttattaccaacttcggcctgattgtgcgcggcacagccaattcagtgcatccgcgcgcgctgcaggaaatcattgatacggtttccgggcggcctgaggaaatggtcgtgtcgacggtcatgctgcggtcgatgcagcaggcgaagtacgatccggaatgcattggccacttcggcttatcaacgaaattttacacacatttcacctcgccgatccgccgttatccggacctgattgtccaccggttgatccgcgcttatttgatcagcggaaaattggatgaaaagacaaaagaaaaatggaaagcattgctgccggaaattgcggaccatgcctcgaaaatggaacgccgggcagtagaagctgaacgggatacggatgagctgaaaaaggccgaatttatggaagacaaaattggggaagagttcgacgggattatcagctcggttacgaatttcggcatgtttgtcgaactgccgaacaccattgaagggcttgtacatgtcagctatatgatagatgactattaccattacaatgagcggcaatatgccatgatcggcgagctgacaggaaatgtattccgcattggcgatgaaatccgcgtccgcgtgctcaatgtgaacaaagacgaacacaatattgattttgaaattgtcggcatgaaaaacaaccgccgcgaaaaaacggaagaacgcccgaaaaagatcgtcaaagtgcgcggcgcccattctgcccggccgcaaaaaacgcgccatgccggcgaagactgggcgacaaggccgccgaaaaagaaaaagaaaaaagcaaatcgaaggtaaccggatttttccgggaaccttcaccggaggggaaacgaaatgccaaaaggcgaagggaaagtgctggcgcaaaataagaaagcaagccacgattattttatcgaagaaacatatgaagcaggcattgtcctgcaggggacagaaatcaaatcgatccgggccggccgcgtaaatttgcgcgactcgtttgcccgtgtggaaaaaggggaagtctttgtctacgggatgcacattagcccgtatgagcaggggaaccggtacaatcatgacccgcttcgcccgcggaaaattttgctgcacaagaaagaaattgaccggctggccggtgtgacaaaagaaaagggttatgctttaatcccactcaaaatctatattaaaaatgggtatgcaaaagtgctgctcggcgtcgcccgcgggaaaaagaattatgacaagcgcgaatccttgaagaggaaagaagccgcccgcgagattgaacgcgcctttaaagcccgccagcactaaaaaaacagtatggcggctcctctgaacgaaaaaagggaaggcgccggatagaagatttgcgcgcttcccttaagaaatggcttttttcaatcgtgggagagaggcctgccgggttccgccttgccaatgctccaaccgttgcgttcatttgttatttctgtctggtgcgggccggccatccttcaatcaatggcggctccgattctctctgctattgttcgctatcattcttcccgccctttttccaatcctgttttatacccgcgatcaaagtaggaatttgacagcttcaatacttgttccgcttcatccggatccagcattttaatgttttccattactttcgcctcctctttttcgttcagttttaaatagaaatcaaagaaaccaaatcgcatacttcctttatttcaattctttttgttcttgtccggtattatgaaatgctaaaaaaattgctttttaacatgtttataacaaagagactcgatccgatggcccaaagcagcacaaatggagccaaccaccagcccgttaattacaggcaaatccagaacgcccaaatatctaaaaaacccgaaaaagggaaatgccagaagaggccaaagttgaaacctgccaacatgccgaaaaagaaaccagttaaatgtgttgctttttttggctttttcacccccaatgatgccaatctccggttaatggataccgacttgttaaaggcttgccagagggagaagcagtaaacggcaggaaaaaatcccctactcgggatggaacagttcaccggctaggctgaaatttcctttgaacgcaatttaagccgacagattgaggttcgaaccgaaattgatggctgccgtccaaagcatgatcaaaagcccgatgaaataatcaccgttgtaaagctgtccgaatccgggaaaagcaaccgaccacagcacggcagaaaaaggggacttatacagttttctttcatccattcttttcacctatgaggtattgtatgtgttttcttcttctgccatactgccgggaaaaacttggctcatacggaaaaacgtatgtgtaaaatttaaggcatactcaatgggacattgagagaagtctatctgaaacaccgttcaagaagcgagagaaagcaacggaacttgaaacaattaatcaggatgtctcaactactcaagcagcctgtacgcccgtcagtgggcgtaaagcacggatcagttgccctgcattcaagcagttcatcggcaatgggacatttaagcaaaatattagaatattagagctttcgttttaagcttggctcagtggggactgatcgttgaggcgcgcgaaatttacgagactcctgcgggaaaagcgagccaggagagaccccgcagcgaggtacgagcgaggaggctcgccggccgcccgcggaaagcgagtgaatttcgcgcgcctcaacatccccgttgtccatctttatacggaaatatcacatcttttccgaaaattacaccgagcaagtgaagcacggtagccgaaagtgtacaaaaagagtgtcttggaatacccgatatttaaaccttgtcgagaaaaacttgacacataccggaaaaactgaacaattgcatcttgcaggattcatgttataatagtatgtgcaggccagttatatgtaaaatctgcagcgccctttttatatcggggacgttacggattcgacagggatagatcgagctcaggctgcgagccggggggtcgtccccgtaaaaacgcaacgcctaaaaataactggcaaatctaacactaaactcgctttagctgcctaataagcactaagcggatcctccctccatcgcccatgtggtagggtaagggtctcaaattcagtgggatacgccggctgtcctccgcctggggacgaaggaagagaccaatcaggctagcgcaccggacgcccgctggcaggcagatggctgcgcgaaacgcaaatatgccagctacgctcgtagacgcctgagtggcgatatctctggacgtgggttcgactcccaccgtctccattttaaaaattggaaagatgatactgttgaaagtccgtgaacccttgatatggctgggtttgcgggctttttgcttttgtggggaataagaaagaatacgggagttttggaaaactttttgcattcaatttgcattgtaaatctgtccatagtgccggattaaatgtgcaatggctctgtttccgccccgtgaaaaagggctgtccaaaaagtcattcatgatgacaaaaatgacaaaaaaaaacgcccttttctcgtaaaatgtaagtgaagaaagagcgttttgatcaatcaaatgatatcatgcaaactacactttttcctgagggacaagaaaaaatgatgaaggcttattgaacaggcaaaatccctggatttggcaaagatgctggccgctttggccgggttcgcccactccaactcagggtacccggtggaatccgcggcgtacccttcttttttttatcagaacactttcgtcgtccaatcctcgcaattccaaacatcggtcgcaatgtcgcggtagaaatcaggttcgtgggataccatcaggatgctgccgcgatacgcttttaaagcgcgtttcaattcttctttggcgtccacatccaggtgattggtcggttcatccagaattaagatattcgtttcggtgtttaaaattttacacagccggactttggctttttcgccgccggaaaggactgtgattttactttcaatatgtttcgttgttaagccgcattttgcaagggcagcacggacttcagcctgattcatgcccggaaaagtgttccagatttcttcaatacaggtgttgggattggcctgttttacttcctgctcgaagtagccgatgtgttggtactccccgcgttccactttacccgaaataggaggaatcagcccgagaatactttttaaaagcatcgacttaccaataccgttcgcccctgtaaaagcaattttttggccgcgttccattttcaagttcagcgggcgggaaaggggttcattgtacccaatcaccagatcttccgccgtaaaaatccatcggctggtggcacgtgcttctttgaaaacaaacgatggtttcggcttttctttccccaattcaatgatttccattttgtcgagtttcttctggcgggacatcgccatgttgcgggttgcgacatttgccttgttgcgtgcaacgaaatctttcaactccgcgatttcctgctgctggcgcttgtatgccgcctccagctgttgctttttcatctcatggacctttaagaagttatcgtagtcgccgacgtagcggttcaactcctggttttccatgtgataaatcaggtttacgacactgtttaaaaacggggtgtcatgcgaaatcaaaataaaggcattctcatattcctgcaaataacgcttcagccattcgatatgctgttcatccaaatagttggtcggctcatccagcaacagaatttcaggcttttccagcagaagcttcgccagcagaacttttgtccgctgcccgccgctcagatcgtctacatcacggtcgagcccgacttcgtccaatccaaggccgcgggcaacttcctccactttggaatggatgcgatagaaatcattgctttctaacgtatcttgcagctctcccacttctgcaagcagtgcatcgacatcagcaccttcatcgcccatttttgcataaagcttattaatctcttcttcagtgtcaaacagatattgaaacgcagagctcaacacctcacgcatcgtcgtgcccttttggaggacggcatgctggtttaaataaccgacacggacttttcttgaccactcgactttcccttcatcgggctgcagtttcccggtgatcatattcataaaagtagacttgccctcgccgtttgccccgatgagtccgacatgttctccttttaaaagccggaaagacacattgttaaaaatcgcacggtcaccgaaaccgtggcttaaattttgtacgtttaatatgctcaattttgctctccttcacttaaggctatatgtggatatcttgtttttgctatcaaaaattgcgttaaaacctattatacaaccaaattggaaaggaaaacaccattgggaataaattgaggaaaaatggctgggcctgaagcccgaatttttggcaacggaaaaagtccatgtttatgaccgaaacgaagaagttaaaggatgtaaaatgtcttctcgacctgttattgtactctcccccgatataaaatatcaaaacgaacttcttgatggtacagctcatgaggtctatattacatattgaatatttttggtgtccatacttggatattaataaaggcgcttgttgtaaatgcaatcaagcgctttgttcttagccaagtcttcattaaatatcagacctttaaaccaattaaacattcaatcctaaaatatttctgggatcttctttctccatattaacaacatctctaaaaattgcttcgtttctattgtattttcataaggcccttcaaccctaaaaatgttttcaacagttgttacatctttttttataaatacgttcgcagcatttaattgaatttcaaagtcctcgcatgagccatttaagactttttcaatatcctctacatactcatctaattcttgctctgtggcaatatcttctataaaatcagcaaataactttatatcatctggaagttttatccttagaacattaagggggtctctataaaaattatattggtattcatccttattctcctttatagattggatatgcagtagcaattgaaccatccttatctaaatacatttccattatgagcccagcgttactttttccagaatacttattgtcgccaataaacttcatcatgacatttttataataaggttttcaaattgaatttatataatactcattgttattgagaaactttttaaagaaatcctctaatgaagaagctattgaaatatcaaaataaaatacaggattatttactaattccaggtctattgaaatataaacatcctcgtttacttcaaaaaaaattaatttattttcatcataaagtgcatctaaattcgcggcgaattcaaaaatcccctctcctaatctgaaatctgctacagcccccgcccctaatatcctatttatcgcattagcactttggcctttaataaaaccataacccacttctaaataaaattgctttaaatcgcttggaaaacttatgttcattctctgctcagcgattaaaatatcattttccgttacattataaattttatgcttgtacctattcataaattcaaaattagccaatttgatcttttacctccttgaaaacagtttttctgacggcgctccctttccatgtatgccagcttggtttcattcggatattttgcaagatgaatattccatattccaccacgcatgagggccatcaaagttattctcaatgatatgatgcgcatcatacgtttgtccaatacttcggacaacttcacgattcttatccatcatttcctcttctggaaatccatcacgtcccgttttacaacctttttaaattatgttataaagagggtattcaaagtttcttatttggctacttcaaaaagacaggagcataaaaagatggagacgacaacggaaaaaaaaccgtacggcacggtgttgatccgtgcgaaagatatactggactatctggaataccgggtggacccggtgagcctgcaggaaatttgcacggctttaaatacgagcaaatccacggtcttaaaaattttaaataccctttgctcgattgattttgtaaaacgggatgaagagacaaaaaaatatacgcttggcaccgcgcttatccgttacggggaaaccgcccgcaaatctttcaatattgtaaacgtggcggaagctgtgctcgaagaactgaatgacacaattggcgaaaccgtccaccttggtatctacgaacaggatcatgtagtgtacgtgaaaaagctgaacggaaaagggcaaatcattttaagctcgcaggtcgggcatacgctgccgctgtattgttctgcgatgggaaaagcgtacttggctgaacaaagcgaggaagatgtgcgtgattatttgtcccggattacgattgaaaaaaggacggaaaacacgattacggacccggaacaactgattcaagatctccaggaagtcaaacagcgtgggtatgcaattgacaaccaagaaaatgaaaaagatatttactgtattgcggtggttatcaagcggaacggaaaaatcgaagggatgatgagcgttagtgccccgcggtttcggatcacagaagaaaagaagcaaaaaatgattacaagcatcctggaagcgcggcaaaaaatcgaaagcaaattgaatggttaatggaaaaaacttgttccgacacggggcaagtttttttattttccctttcatgaaatggtttacataggagagagtgtgttgtaaaatgaaattgaatttactattcataaataaagtttattatatagaaattaaaaggagcgtccaccatgaaaaaaatgcagactttgcaggcgttagaaaaaaatggaatcgttgccgtgctgcgtgcagactccgtggaaaaagctttgcgtattacggatgcactgattgccggcgggatcaaaagcatcgaattgacttttaccgttccgaatgcggatgttgccatcaaaaaaatgacggaactgtaccgggaccgtgacgatgtcctcgttggagccggcactgtactggatgcccagaccgcccagaccgcgcaaatggccggggcaaaattcatcgtcgcgccgacatttgatccggaaacggctgctttttgtaacctttatcaaatcccttatatcccgggctgtatgacggtgaatgaaatgaaagcggccatgcaggcaggagcagaagtaattaaactgttcccaagcaatattgtcgggccggcatttgtaaaagacgttaaagccccgctgccgcaacttgaaatcatgccttcaggcggaatcagtctggacaatatggaaaattggatcaaagcaggctgtaaaatccttggcgtgggcggaagcttattgaaacctgccgaaaccaatgattttgcaaaagtgaccgagacagcaagagcgtttgtggacaaatatcagcaactaacagaagccgtgcatcagcaatcgaggggtcaatatgcctaaaattttaacacttggagagattttgctgcgcctttccacctccccgggagatcttttatcctgcagccattctttcaatgtaaattacggcggggcggaggcgaatgttgccacaacgcttgccagtttcgggcatgacgttgcgtttgcgagcaaagtaccggattcctctttgggagcggctgcagtaagaagcctccgggcaagcggtattgatacttcccgtcttctaatgggcggcaaccggcttggcatctattttttggaacaggggggcacattgcgcaattccaaagtgatctatgacagggaaagttccagcttttcacagatggatattggcgagtgggattttgactggctttttgcggatgtggcccttttccacctgaccggcattacctttgctgtggccgaatcatggaaatattacgggcaaattctcgttaaagcggcttttgaccgcggcatccctgtcagcttcgacatcaattaccggccggcaatgtggacgatggaagaggcgagggcagccattatcccgatcttgccgatgctcacttactgctgtgccaactatcttgatgcccggaacttctttggtatcgatgcatcggtggctgtgcccggcaatatggaagcatgttaccgggaaattagccgcaagtacccgaatctccgcgcactctatgcgacagaccggaacgttatctccccgacctgccatgaactccagggcatgctctggactggcggcgtttttatacaatccaagcgttaccgtatggagcagatcgtagaccggataggcggcggggatgcctatgcagccgggatgctccacggcttcttaaccgggatggatccggaagaaaccgtacaatttgcgactgccacctctgtgttgaaacattctgtgaacggggatgccctgccgctttcagcagacgaagtccgatcatgggaaggcgcttccggccgggaagtcgttcggtaaacaggtgctcaaaaaaatcaaaaaaactattgaataaatttgaaagcggattataataaggaatgtaagaacaaataagaaacttgatttctaaataggaaataaaaggaggggcgaatttgaaaaaattatcctactcgtacgtgaaagacctgcaacggtatcccacaaaagccattcagtttggagaaggaaattttcttcgggcttttgtcgactggcaaattcagcaaatgaacaaacgcggactttttcaaggcggggtgacaattgtacaatcattgccacgcggaagagtcgggcagcttgctggacaggactatttttttacagtcatgctggaaggaatgcaaaatggaaaagaagtccaatcccatgagattgtttcatccgtaaataacgggatcaatccttatgaagattatgacgcttatttacaactggcacatgatgacaacatccggtttattttttccaatacgacggaagccggcatcgtctatcatgaaggagatgcattatccgaccggcctcccgtaagtttcccggcaaaactgacggcactgctctatgaaagatataaggccggaaaaaaggggttttacatcattccttgcgagctcattgaaaataacggcaaggcactgaaagaaattgtgcaccgctatgcggatgagtggaagcttggcgaagatttcagcagctggcttgaatcagaaaatactttctgctccagcctggtcgaccggattgtcccgggctacccgaaagaccgcgcagaaaaactttgggaagaatggggctatgaagatacgttaattgcaaaagcagaaccatttctcatttgggtgattgaagggcccaaggagctggaagaagaactgccgctcaaaaaagcggggctgaatgtcgtggtcaccgatcatttaaaaccgtaccgcgaccggaaagtatacttactaaacggcccccatacaacaatggcttgcctggcgcggcttgccggcattaaaacagtcggcggggtaatggaagatcccgatttttaccggttgattgaccgcgaaatgtttgcggaaatcatcccgtcactggatttgccaaaagaagagttgacaagttacgcggcggaaattcaggaacgtttcagaaacccgtatatggaacaccagctggacgcgattgctttaaacagcgtttcaaaatttaaggcacgcctcctgcccatattggcggagcatgtaaaaagattccacaaaatcccgtcaagaattacgttagccttatccgggctgttgaaaatttacggagagcaggatcatgcctctgctaaagcgattgatttgccagatgttttgaaagagttttcaatgacgtatcactccgaccgctatgtctgggacattttaagcaacgaaaccttatggggaatggatttgacaaaaattgacggcctgcccgctcaagttgaaaaaggcttacagttgatagaaaaagagggcgttcgcagggcagtgcagcaggccaacgaggaggcattaccggttgaaaaataaaaccattcagctaaacccccgggataatgtactcgttgctcttcaggatttagagccgggtgatgtccttccatccggggacaggacgatcaccgtaaacgaggcaataaaaagagggcacaaaattgctttagaaaatatcggagagaacgctgacattataaaatacgggtcacccattggacatgcgacaaaaaagatcgaacaaggcagctgggtccatacccataacgtgagcaccaatctttccggaaaagtggaatacgtgtacaagccggaactgcatccccgcatctttccgaaagacagccgcacttttaaaggatatttgcggaaaaacggaaaagccgggatacgcaatgatttatacatcatcccgactgttgggtgcatcaatatgatcggtgatctcctcgttgaccaatttaaggcgaatcaccctgataacggcgcatttgatgaaattattttgtttaaacatccatacggctgttcccagctgggggatgatttgcagaacacgcgcaagattttaatggatgcggccgctcatcccaatgccggcggtgtgctcatctttgggcttggctgtgaaaacaaccagctggatgaaatgagggcacaaatgggggaatttgatgaaacacgcgtaaagtttatgatttgccaggatgtagaagatgaagtggaaacaggcctccaactactggaagaattgaatgaagctgcaaaagaggacaagcggatcgatctgcctttatcggaattgaaaatcggattaaaatgcggcggctcagacggattttcgggcattaccggcaatccgctgcttggaagattttcagattttgtcatttctcaaggcggttccactgttttaacggaagtgccggaaatgttcggtgccgaaaaaatgttaatggcacgggcaaaagatgaaatcgtattcaataaaattgtgaagctcattaatcagtttaaagattattttgcttcttacgggcagccaatctatgaaaatccttctccgggcaataaggccggcgggatcacgacgttggaagacaaatctctcggctgcacgcaaaaagcaggaacatccgctgtggttgatgtgctggaatacggagaaaaactaaaggaaaaagggttatccctccttcaggcacccggaaatgatcttgtttcttcaacagcacttgcagcggcggattgccagatggtcctgttcacaactggcaggggcacaccgttcggaacctttgtgccaactgtgaaagtatcgacgaacaccgaactttacgaaaagaaaaagcagtggattgatttcaacgcgggacggctgcttgatcaagaaatggacgaagtagtggaacaatttatttcttttattcttgaagtcgcgagcgggaagaagacgaaaaatgagatccgccatctgcatgagattgcgatatttaagaacggcgttactgaataaaccattattccattccaaaaagaaggtatagaacatgttcttaaatcaagattttctcttaacaacagattttgccaagaaattatttcacaaccatgccgaaaaaatgccgattattgattaccattgccacctgaacccgaaggaaatctacgaaaataaaaatttcagggatttggcacaagtgtggatcaatgaagggcattacggtgaccattataaatggcggttaatgcgcgcaaacggtgtcccggaaaaatatattacgggtgatgctgacccttacgaaaagtttttaaaatgggcggaaacgattgaaaaatcagtgggcaatccactttatgaatggacgcatttggagttgcggcgtttctttggaattgatacgattttaaaccgcaaaacggcaccggccatttgggaaaaggcaaatcaattgctggcgacagatgattttaaaccacggaatttaattaaaaacagcaatgtgaaagtggtttgcacaacagatgacccggtggatgaccttcaataccataaattgttacaggaatccgagacggaaaatggttttaaggtgctgccggctttccggcccgataaggtgctgaacatccagaataaagaatacgctgattatgtccacaaattagcaactgtttcaggcgtttcaatccaaaatttctcggatctcgtttcggctgttcgaaaccgaattgaatatttccatgaaagaggcggacggttatccgaccatgccctggatacttttacgtatgcagaggcggcgccgcaacaattggatgcgatcgttgagaaagcgttatcacaagaagcgttgagtttaaatgaaatcaatcaatatcacacagcgctgttaatagaacttatgcacatttatcacgaaaaaggctgggtcatgcaatatcacattcatgctttcaggaacttaaatgggcccatgtttgaaaaactggggcctgatacggggtatgatgcattgaatgatcgaagtattgcagaatcttacgggaaattatttgcccgtgcagaaactgaagatatcattccaaaaacgattctttattctttaaacccgaacgactggctcccgcttgtcacgatgatgggctgtttccaaaaagatacggttcagaaattgcagctgggatgcgcctggtggtttaacgatacaagaagcgggatgcgtaggcaattggaaatgtttgcagaagaaagccttctgccaaattttgtcggcatgttaaccgattcacgcagtttcctgtcatacccgcgccacgaatatttccgcagggtactatgcgagctatttggcgaatgggcagaacggggacaaatccccgatgatgaagaacagatcgggaaaatcattgaagatattgcttaccataatgcttatcgatattttggtttttttgagtaataaaggcttatgttgttccagagttggaagatttcgcactttttaattaaaataggtggtgcagaaacatggctgaaagcgttgtaaaaacgaccgcggaaaagataattgatccgcagcatgcatccaagcgtatttcgttaaaagaaaaagtgagttacggttttggtgattttgggaatggttttatgtttgatttggggcaatcttatttgaccaatttctatacggatgtcgcaggcattagcgctgcggcagccgccggtgttttttcgattacaaaaatctttgatgcatttatggacccattagccggatccatcattgattcgagaacccccggaaagcgcggtaagtttcgtccagttatgatggtttcttctgtattgctagcgattatgacagtcattatctttataatgccgtccggtttatcaccaacgatgaagatcgtttacgcatatgcaacatatatggcttggggtgttttgtattcgtttacaaatgtgccatacgggtctttggcttctgtcatgacaagaaatgtagatgaccggtccttcatggcttctacacggcaggccggctcaattggcgcccaattggtaactggtgttgcttttgttccaattatgctgttgttctcaaatacaaaagtaggttatgccgttactgcagctattatggctttcattggtatatgcggtttctttatatgctatatcaatacaaaagaacatattcatgctgaaaattcacgaagcaaagaacgcgaaacgatgaaagattatcttcgggtcgtatttacgaacaggccgctgtggagcctgattttaatgacattatttacaatttctgctatgaatacaaacaaccaaatgatgatttatttctgtaaatacaacctgaataacatcggtttgcaaccaattattaattttatcatgatgggctgctctgttgcagggattacactcatcccatttttggtaaaaaagtttggcaagaaaaaaacagcaattggcgggcttatcattggagtcgttgcggacgcattgaattttgtcattccaaccaacattgtgacattcattattttagttacgatcgggtatgtggctttagccattccgaacggtgttacctgggcttttgtatctgatacgattgactacggccactggcatacaggtgtacgtaaagaagggattacctatgctgcctttaacttctcgagaaaaattgcccaatctattgcagcattggtctcagcaggcatacttgctacaacgggatatattgcaaatgcccatcaatcttcaacaacattgcttggaattaaaggggcaatgacgatttatccggctgtcgctttactgcttgctgcaatcattatcacatttttatataatttgcctgatgataaatttaaacaaattgcaaatgatttggaaaacggtcgttgggaaaagggtacatttattcaaggataaaaagaaacaggagatagaaaacacagcattttacttgatgtaatcataaaattttgataaacggctgctttcttaaaattctagaaggcagccctgttcatttagtaatgatgttttataggtgcacttattgtttcctttcaggtcatttttttgctgtgtttaaaggcatattcggcgaagaagctgtgaaagtaagcggactgttctctcatactttctcatactttgctgcatgccgtttgcttattactgatcagctatagggataagaaacatctgtcctaattgatctttccattttaccaaaattattgctggtacagcatggtctctggaaatgacagatgatcgtgaattcgcggggcagattgtactgtcggcattcagcttctttttttataatttcaattattaggaggcttttatatgaatctcaacgacttcaccctcgactttttcagtttaaaaggcaaagtggcggtggtaaccggggcggcgacagggcttgggcaggcatatgctgttgcgctggcgaaagcgggggccgatttgtatttaccggtgcaccggtcgagcggcgaggagacgaagtccctcattgaaaaacagggcaggaaagccgtgctcgtaaaggcagatttgagcgggaaagaagcagcaaagaaagtgattgatggctgcattgaaacgtacggcaagattgatattcttgtgaacaacgctggcattattaaacgggcgccgctgttggagtataaagatgaagactgggagaacgttcttgatgtgaatttaaatggcgtctactacttaagccaggcagccgcaaaagaaatggcgaaacaaaaaagcgggaaaatcatcaatgttgcttctatgctttcttttcagggcgggaagttcgttccgtcctacacggccagcaagcatggtgttgcaggccttacgaaagcgtttgccaatgaattaagcacgttcaatatccaggtcaatgcgattgccccaggatatattgagactgctaatactgccccgattcgtgcggacgaaaaccggaatgaagaaattttaagcagaataccggcgggcagatggggacaacctttcgatttaatgggcgccatcatttttttagcaagccctgcatctgactatgtgaccggccatattcttgcagtagacggtggctggctcgtgcggtaaatcaactttgatttataaaaaattcacaaggagtgattgaaatgtcccaaaccatggaaacaagatatacccacagcccggaagacatccggcattacactacagaacagttacggaaagagtttttagtggaaaagatttttgttcccggcgaaatcatgctaacgtatacccataatgatcggcagattttcggtggggttacaccgacaaatgagccgctagagatccggctttcaaaagaacttggtgtagactactttctggaaagaagggaactgggcgtcatcaatatcggaggacccggcagtatcacgatagaaggcaaaaaagacccgatgaaaaaacaggacggctattacataggaaaagggacaaaagacgtcgtgtttgaatcggacgaccccactaacccggcgaagttttatgttgtttcagtgcccgcgcatcacacatatccaaatgtgaagatcagtattgaccagattacgccgcgtgaaacaggtgaagatctgtctatgaacaagcggaaaatctatcaatatattcacccgaatatttgcgagtcctgccagctgcaaatgggttacactgtgcttgaaccgggcaatgcctggaacaccatgctaagccatacgcatgaacggcgtatggaaacgtatttgtactttgacatggaatcggatacacgggtattccatttcatgggcaaaccggatgaaaccaagcaccttatcctatcttcagaacaggcggtgatttccccgagctggtcgatccattgcggggtagcgacgagcaattacacgttcatctgggcaatgtgcggggaaaatatcacctatgatgatatggattttgtcccaatggaagagttgaaatagaatgtatagcaataagcttctcttctccaaagaggagctttctttttttacaacacaatgccgaaattccttgaccaatcgccataatcctctataatgaaattgtaatacaaatagtaaacttaatttcttatttagaaattatatggaggcgaatcaaatgagcgagatcatcactgccggtgagccgcttgtgttgtttattgcggatgaaaaggggccgctccatgctgtccggcattatacccgttatatggccggtgcggatgtgaatgtatctgtcggggtttccaggctcgggcacacggtttcgtttttgacgcagattggggaagaccctttcggcgtatatgtgaaaaatttcttaaacaatgagaacattgataccacctatgttttttcaacaccaacatatccaacgggtttcatgttaaaagggctgtcggagattggcgatccggaaaccgtttatttcaggaagaacagtgctgcttctaaactaacaaaagaagccgttcgtcaggttgatttttcagaagcaaagatcctccatcttggcggcattttggcgggattaagcgaaagtggttacgagacaactttggcgctgattgaaaaagcccggaaatacggccttacgattacgtttgatccgaatttgcgtccggtaatttgggaatcggaagaaaagatgatggaacggacaaatgaaatcgcttgcctttgtgatgtcgtcatgccaaatgcaaaagaagcacagattttaaccggcgagcatgaaaaagaaaagatggcggatttttacttatccagaggtgtgcggcaggtgatcatcaatttagtggaaaaaggttcgtattcaaagaaaaaattggaggatggttcatttgctgaagcggcagtgccaaaatatgaagtgaaacatttggttgaccgcattggagcaggtgatggttttgtatccggtatactggccggcatactggagcatcttgacgatcaggcgcttttaatgcagggcaatgcgatttgctccatccagatgcaaagcctcggggacaatgacggcctgccgacgcgggcagcattggatgcgtttatgaaatcggccgccttgacagcggcgaggtaaaaagtctggcattcctgtttcaggagcctcatagaatagaaatcgtccggcactcttgttttttcctggagtgccgggctttttcccttttcaaacccttttgtgtgaaaaatacaaaaaagtacttgaccaaaaatgaaactgtcatataattttaaatgtaaaccataaattattttaggttgacatttaaaaagaggtgacattagtggattggacgaaattggcagaaaaggtgattgaaggttatgtgataagggaagaagaggccaaggaaattttaacggttagtgatcatgaagtattagcacttgtccatggagcctatcagattcgccggcacttttatggaaaaaaagtaaagctgaatttgattattaacgccaaaagcggactttgcccggaggattgcggctactgtgcacagtcgattaaggcagcaacaaaaatcgaccggtatccattggtcagcaaacaaacgattgtggaaggggcaaaggaagcgaaaaagaataaaattggtacatattgcattgtgatgagtgggcgcagaccaaccaaccgtgaagtggatgcagtgattgcggcagttgaggaaattaaacgtgatgtggaaccattaaaaatttgtgcctgtttgggactcgttactgaagagcaggcgtttaagctgaaggcagcgggtgtggaccgatttaatcacaatattaatacaagtgcaaatcaccatccgaatattacgaccacacattgttatgaagatagggtcaacaccattgaaaatgtaaaaaaagcaggaatctccccgtgttccggtgtgatttgtggcatgggggaaacggataatgacattatcgatatggcattcgcgctcaaggatttggacgctgattccattccggtcaactttctgcatcctgttaagggaacaaagcttgaaaatatggacgaattgacaccgattcgttgtttaaagattttgtccttgttccggtttatcaatcccacaaaggaaattcggattgctggcgggcgggaatatcatttgcgctctttgcagaatttagggctatttattgccaactccatttttattggtgattatttaacgacagatggccaggacgcaaaagaagattaccagttaattgaagatctcggatttgaaatagaagaaaatccgttcgaaacagaaggccagcagttcactttgtatcattcgtagatacgctttactcttaagcacctcacattcacgcttggcgtaccttttttcatagcaaatgattaaaaaaagcattctttttttggtactgatcaacttgcagccaaaggaaaggaatgctttttagctatggaatggtaaaaactgtggcgcccaacccatttttttatcattctctcgtgatctcgcggaaatgttccagcacaaattgtttaaatctccggttgcagcggataaatatcttctctcaatccaggcaattctccgttttggagtggtttttgcaatttttttgatcgctctcctttcaaataggcaaaatggcaccctctataggtatatggacacatttagaatgattgttcactattttttttaatttgggataaaatttacgagatttattgattataatggtgtttgatacatagaacaaaaggaggagacagattgcgaagattgatttttttcgggggtgcgggttttttgttgctgtttgcgctaagttttgcgaagcctgcttcagccgcctcgtctaccatgtatacgtggacaccgtcgaagctttataaaacggcgtccggcgcagcttacttcagaaatgtgaacagcgggatagcggtaaccgtctacagcaagtcgggcaagcgctataaggtgaaagcaggcggaagaacaggttacatttatgctgataacctgacaaggagcaaagtgaaaaaagaggactattttggttcgaaaatttataagcaggcggcaggcggcccgtatgttgcttccgtaccggcggggaagatgatgtatatcaaaatggaagcaacgaaaaacggcatgtatctggcccacgtaatcggaaccgggtacagcggctatgttgacaaaacccattttatcaagccagttgtaaaatatacgtggatgccgtctaaattatacacatccgcaaccggcaattcgtataaaaagacgattaaagatgggcaaaaagtatcggtttttaacgggtcgcacggccgttaccaagtaaaagcaggcagcagttccggatatatttacgcgaataatttagccggcacgctggcgaagaaaacggtctatgtttcttccaaactgtataccacttcgtcccatacaaagtatacggctgtcatcaggccgaataagcaggtatatgtgaaagaaagcacccaaaatatgtcccatgtctgcgttgttgggacagcccaaagcggctggatttatacgagccacttcacaaaacctgcaccggcagcgggcggaacaaccagcacgccgaaggcaacagcagggacaagccaaacggggtcttccacagcgggcggcacaacggcgggaacagcaaccggcagcacgtctggatctgcgtccggcataacagggtctgccgcagcaacaagcggcacaactgcaacgaccacaacaggcaacactggatcgggttccgcatccgcaacgaccgcaacgggcaagaccggatcgagttccgcgtccgggacgactgcaacgagcaacaatcgggttccgcgtccgggacgactgcaacgagcaacactggatcgggttccgcatccgcaacgaccgcaacgggcaagaccggatcgagttccgcatccggaacgaccacaacgggcaacaccggatcgggttctacgtccggaacgaccacagcgggcagtaccggatcagccactgcatccgccacgacggcaaagggactggatgtcagccattatcaaacattgacacagagtagttttaaccttatgaaaagacagggctacagttttgtcatcctgaaagcaacggaaggaaccgggtatacggactctaagttttatacatattataagtatgccagaaacgccggcttgtcggtccatgcttatcatatgatcggcaattccactacggatcccgcacagcatattgcagaagccaagcatttttatcaagtgctggcccaaacaaaggcgagcaccggctatgcttttacaggttacgctttcgaagatatagaacctaccgggacgaatagcattacaacaacttggtgggcaaatgcggccccggcctgtgccggctatttcttaaatgaaatgcaggcgctcgggcaggcgaaagtgggtatttatgccggctactttaattggaacagctatcttgagggccatacagatacttggcccggcaataccaaaatttggctggcacgatataacaccacgctcggtacaaatgcggatgtttggcagtacaccgaaaccggaaccattgatggcatcaccggccattttgaccttgatatcagctatgaccctgatttttaaaattttttcaaaaaaacggcgagaatcgattctcgccgttttgattttgcttccatcagcatcagggcccgcctaaggtttgatcgtagaaattttccctgcctgccggtccaagcctccaccttgcattcccgtttgttgccggctcaggccgattatgcattgtaaacttgtccattcatccgttttggccaagcggctcaagcgggtgatcaggcatccgcaaattcgcggatttttttggctgtttttctgcttacccctcccggcaggacggcaaacccgtagagcaaaagcataaagaaagcacatccgaatagccatctgtacagataccggtttatgaaaggtgcggtaatctgttttgatacggtaaacgtaaggtctgtttttgccatgggtttgccattttggtacaattgaccgcccccgtacaaatccatctgctcaaaatgtccaccccggccgttcgcctgaaggaaaagccgggcatgcgccggtccgtggagctgttcgatccggagcgaataatgcctgttttcgccgggcaaggcttttttcaaaagaaatgcctcatagccgtttgtttttcgcttatggtttgtaaattttcgttcaaacaccattttttgccgtccggcgctattatgccataaagaaacgcggtatgcggctttgccgtggaaccgggcaggcataaaagcgacccggtcgaaagctttgtctgcgataaacgtttgggtaacggtatgatgccggtcgacaagcgcaacaggttttcctctggctgcctgctggttgacgatataatcctcgtatttttcggttgtccctgtgaatgttttttcattcgatttggcgcaaacggcgagcaggacaataaggcttaaaacgagcagccagtttcccgctgtttgcagtttccatcttttttgtgccggcagccatttttttgcttccaggaactggcgcattttttcaaggccccgtgcagcgcaaaaaatcataaatggcgtgaacaggagggagtagcgcggctctgcttcccaaatcaaaatgaaaaacaaatagctgccaaataagcaaatttgcatgagcaattgaacgtcaaaccttattttacggaagaacgttaagccggaaacggccagcaaaaagagcgttgcaatatgaaaaacctggatgataaacaacagcacttgattctggtctccgtaaacatagcggtatgcggcgttgtaatggtccatccgctgattgtacttggcgtaggcctgatcgccttgtgaaaatgtgcggaaggcttttaccgcccagagcttgagcagaccggatggccccctcgtttcgatccgctgtttgatcagtgcaagatccgcctgtttttttgcctgttgggtagggaggcgttctgataatctcgtatccgcgacattgtaccggccttcatttgaaaggccgagcgccagccagtgggttaccggcgccttgatgctcgtgttttcccggtagccgagatggtggtaatacgcctctgctccaaaggtgacaggcaagaaaacaagcataatcaacgctgcccgcagcacggtttgtttcagccggagcgtatagaccatgtagatcaaaagggcaggcaaaaacaataccatattttcccttaactggcacccaattgcaagcactgcaccaagcagaaaaaggtatgccgggcgccccgtacggctgtggcagtaccaaaaatacaccgccatggagggaaaggcgatcgcaaggctttctgtataaaaatacgggatataaagaaagagcggcagccatgtaatcgtaaaaacaagcagcaaatttcccgttttgcggccggacgttttcaccgccagcagccagagaaaaaagatcccgatattcagaaacaaagctgctgccagcttatctgcaatcaaaaaccagtccggattcccaaacgcggcatagcggtaaagcaggtaacgggcaatggtaatcggcacattattcgggtagagctgcaaatagtactcatttccgagcaatgtcccgtgttttaataaatacaaagcttccagataaatatggccgccatccactttgggcggctgcaccccgtgaaacaggataaggatcgccgcttcaatagacaaaataacggcaaacaaaaaggctgccattcttttcagcccgttgtctgaaagccttgcaaaaatgcggcaacagccaagataaaacaagatggcgactacagcaaagaggaacagcgctgccatctgcccggttgaaatattccattttccatcaagcagcacgaaatgcgggtcatctttttccgcccacagcggcgcgatgaaaaagctgccgatcgtgataagagcgcatgatacggtaaaaatgatactgaaaagactgatggttatctttttcacgaacatggagggctcacctcatggattgtctttccgcgcaatctccattctcattgcgcaagttgtgtgtctggttagtggtgcatgaaaacattcttttttatcatgccccgccgcctgcacttcgtattcttgcataattttccagatttctcaagggaccagtatagctgcttattctgaataaaccgtgagaattcaatgaaaaaacccgcagttttttcagcggtacgcggaaattgcggccagccggcaggtgtttacgtgaagggttttccgggcgaaatgccgcgcagcacggttttatcctgaaccatccttttgccggattggccgtttttaaggcggtgaaattccggccgaaaaatgcccgcaaaaaccctgcaggcggcttgctgctcaaaatacggccaatattggcaaaatacttgttggaaaacacccatccggtatacaattcaattgtttaaaatctgcttttttggtaaaaatcagaatgaacttcccggcaattgcggaagtctatttattataaaaagaacaggcttccggaaaaggaggaagacagcttggctaaagtgctcatattaccgcttttaaaaatgccgtccggccaccaccaggtcgcagaggcgttaatgcataaattgaaatgtatggacagtaccattgaaatgaaaaaagttgatttgatttcctatacgagcgggatgctggaaaaaatcgtcacgaaaatgtatttgaattggattcaaaaagcaccgcggacataccaatgggtgtacaaacattttttttatgcggatgccgaccagaccgcattaatgaaactctatgaactctcttttatgaagcaaatggaaaaactgattgccgaggaaaatccggatctcgtcatttgcacgcacagttttccgtcgatgctgctcagccggctgaaatcaaaaggaaaagtcgatgtcccggttatcaatgcgtacaccgattttttcgtcaacggtttgtggggaaaaaaagaaattgacatccattttgtgccgaaccaaacgatcaaaacgacgctcatctgtaacggcgtgcctgaacaaaacatttttgtcaccggcattccgattcatgaagcgtttaaagaaagaacggctttgcgccatacatcccggaaaaaaatcttaatatccggcggcagcagcggcctcggtgatctgtaccgccttctgaaggcgttgaaacgggaacagccggacagggccgattattatgtgttatgcggaaaaaacgaaaaattgtatcacaagctgaacggatgggggatgaaacatatcatcccggttccgtatatccagtccagaaaggaaatgagccggctgtacgatgaagcggatgcgatcattacaaagccgggcggtgtcacgatcagcgaagtgattcaaaaaaaactgccgatttttatccactccgtcctccccggccaggaagaaatcaatcttgcttttttgaaacaacacgggcttgtctttgaattggacttcaccaaaccggtggaggaacaggtgatggaaattttggaagacgggaagcagctggcccggttttaccggcggctgcgccaatacgggagcgaaatcgaactccaggggaaagaatttgatgtattgatccgcggtctgctcggccgcaaagcaaaccaaacgccggataaagtgctgaaggaccagtactttgtttcaacctcttattgattttttgcgggcgtctatgttcctgaaaggggctaccgttcgtttccggggccttttatcatcatttcctgccggtgaaaaccgggcacatgtttcagtccggcccaaagcttgcatcggcattttgccgcccgtctttctggccggtatggggaaacttctatccaaatggggcgctaagtggatgataaaaaaacttcctgatggcggaaaggaaaatatgccataatgaacatggaatgaaatgggcgtgtgcacctgcaatttccttgccgcttttgcacatgcccgggcaacggcaaaagaccgcgttgcttaagcagggagttgaaaatggtggagcaggatttaacacagttgatccggcaggcaaaagcaggagatacagatgcgtttgccgtgctggtggcccagtttaaaggggaggtgttccggcatgcatacgccatgacaggcgaccggatggaagcggaagatatcgcccaggaagcgtttgtgaaagcctggtacgccctggataaactggaacatgcctatgcttttgcttcttggatgtcgaagatcgtctctcatttatgctatgaccggctgaaaaaattgcgaaaaaaagcggcacttcaggcggaaatagaagaggagccgctgaggagggcaacttccaatatcgacagtgccaatttgagatttgacatccgcggcgcgatggaaaaattgtcgccgggacatcgggcagcgatcgtgctgcgcgatatccagggctattcctatgaagagatcgcagacatcttgaacatcccgcttggtaccgtcaagtcgcgcatcaacacagcgagaaatattttgaaaaaagaactttcaagagggtgatcacatggaaacacacgtccgggatttattgccggccttcatggatgatgcgttaagtgaaacggaccgaaaaaaggttgaagcccatcttgccctttgcccggattgccgccgcgaactggaagaattggaggcggtccaggcggaaatcagccgtttttaccattcggttgaggtgccgggaatccagtttgaaaaggcggttctggctaaaattatgccgcaggaaaaattggcgatgcattaccgcgtgtttggctggttctttgcggtttgctgtgccgcttctgtgcttgccacctacccggtgatgagaaaaccgttttatgtcggcatgaatatttttcaggccctcttcaatattctttcaagcggctttcatattgcgctttccattctttccgcgctcccggctttgtctgcggggatcatggtggtgatggcggtgattttggctgtctgtatctggattttgttcggccttctcaccatgaagccggtgaaggattaggggatggagaaaaaaatgaaagccacaaaaacattgatttgcttattgtccttgctcctgctttttctgagcgcaggggcgggtttccaccctgcgtttgcaaaggaaaaaagaatgagaatcatcatccacgaccggcatacggtcatcccgaaaaatgaaaaagttgaaaatgtcgttgtgatcgggaataacgcgaccgtcggcggatatgtcaaaacagccgtcattgtgatcaacgggaatttgaatattcgaaagtcagcggatatccgcggctctgtatttgtgctcgggggaaatatcaaacagcagccgggtgcccgtgtaacggaacatgtcctgtctatcaatatgaacaataaaacgcttgacagtatgatttttgccgctgtcatgcttcttgccctctggtttttccggctttccgcaagcctgctgttgattgtgtgcactgttttgttcggcttaatcgcgcaaaaaccgcttttttccgggatccggtccttctacacgcggcccggaaggatgatcattaccggctgcctgctgtcgcttgtcgtccttgcgctcagtctgtttttgacgattacggtggtattaataccggttgtccttctgttatcccttgctgtttttgtatccctcctggcagggctcgtgtttcttggcagggaaatcggcagcacctttgacgttttaaacggcagtcaggaatggctgaaattgttaacgggcgtgaccatcctggttgccctttgcagcatcccgctggtcggggaagtcattttcctgattttgttctggtactcgatcgggctttcggtcacatggctatttcaaaaatggagaaacaggaaaaaacgtgcggacgcaaaataagcggccgcatgttttttcgtgaatacccggctacttttttttcatccgggaactgggcagatcccgatgaaaaaacagggaaatgccaaaacggtgtttttgtttccggaaaaaagtcttgcattgtttcaatttttcgcaacaaatttttacagtatttttcaaaatacgtttaaatggaagagcaggaaaacaatggccgcaaatttttatcgcctgtaaatgaacttttctttttccctcaaagtctattgtattgtatcgaaaggaagccgcatgagaaagagaagcggcgcgtttcctgtaaacagaccgaaaagcagaggggaaaagaaaatggccaacaagaaaaaagacaaagtgttgatattaacaggcgcttttggggaagggcatttgcaggccgcccgggcaattgaacaggcgatgaaaattcgttccccaaaagcagacccggttgtcgtcgatttcatggaatgggtccatcccgcattatgcccggtcagccactatgtttatatgaaaggtattgaaaaattcccgaatctttacgggtatctgtaccgtaaaacgtatggaaggaatgccctgtcgaaaacattgaccggcttattttctacagggatgagaaagacactacggatgctcgaaacgatacgcccgtccgtcattgtcagcacctatccttttgcgtctgccatgatttcaaaattaaaggaatacgggctgtccgatatcccgctcgtcaccgtcattactgaccatacacaccacagttcgtggctgcatccgtacacagatcattatgtcgtcggttcgcatatgttgcgccggcagctgatcaggatcggcattcctggccggaaaatttcctgtacagggatcccgatcaaaccgagtttcctgaaaccagtgaacaagcaggctttatacaaaaaatacagcctcgatccggcgttgccggttgtgcttgtcatgggcggcggggaaggcctgttcggggacgggctgttcacggctgaaaaactggacgcggtgcctttccgcatgcagctgttgatcgtgtgcgggcataatgaaaaactgcgcgcccgcctgatggatgatctgaaagggacgaaacacaaggttttcgtgctcggctatattgattatgtgtgtgatttaatggccgtctcggacgtcatgattacgaaaccgggcggcgtgacaactgcggaagcattggccatggaactgccgatgattttatacaaagcgttgccgggccaggaagaagataacgcagcctttttaacacaagcaggcgcagcagttgaggcaccagatgaaggaacgttaatccggtgtttagcccgcctgaatgaaaacagggcacagcttgcgaagatgaaaagaaatacgctttcgattcagaacagggaagccgcttttcgggtgctttccgttattgaccaggcaaaatatgcgcggctcattcactcgcctgatccggaaatgccggataccgcgcacggaaagtatgcaaggatgcgaaaaaaggctttgcttgtgcatgaatctctggatgaaaggagcggcacggtgtggaagtcatcatctgggtattgattttattgcttttcatatatgctattattccatattttttagcggccaaactcggtttctgggtatgttggaaaggaaaaaaagatgcggagattgcgctcacctttgatgacgggccggacccggtatatacgccggtactgcttgatcttttaaagcgggaaagaattaaggccactttctttctcgtcggggaaagggcggcccggtacccggaaatcgttttgcgcatgtcgcgtgaggggcattgtatcggccttcataattataagcaccagtgcaactggctgatcagcccttggaaaaatgcacgcacgcttgagcagtcggcacaaattattgaaaatatcaccggggagaggccggttttttaccgcccgccgtgggggatgatgcatctgctggacttttttctgcacaagcagttctgcatggtgcactggtcgaaaatgttccgtgattggaagagaaaaggcggttcggaaaaagtttcaaacggtctgatcacccgggtggaaagcggtgatgtgattttgctgcatgattgcggcgtcacgccgggcgcagatgaagatgccccgcagtatacaattgaaggtttgcgggttgccatcccggcattaaaagcgcgcggcttccggttcgtgcggatggacgagatgtttgacaaacattcttctatcaaaaccagccatagaagaaaggaaagaaaatagagccatgaatgagaatgccagattgttttttatggtccacaacttgtcagggcatgacaaattactggatggcatcatgattttttttacacaggatgccttgccgctttttgccgctgttttattgattgtgtggtttttgggcaatgataaaatgaaaaatatggtgctttatgccgggattgccgggattgccgctttgctggtcaattttttgattacgcttgtttattatgaaccacggccatttaccacgtatcataccagcattttaattccgcatgcggccgatgactcgtttccgagcgaccatgcgacaggcacgtttgcaatggctttcgccttatgggtgcggaaccggaaactcgggtcagcgatgattctctgtgccgttttgaccggcatttcccgtgtatgggtcgggcaccattatccgggggatattgcggcaagcatcattgttgccttgttcaccgtatgggccattcaaaaaatgaaagggttgtttgatccggcttttagcatgctgatcggctggtatcatgacatatgcgcaaaatttacaaaaaaaggatataaatgaacaatcactcgaaaagagggcgggacaccatttggcactgtgtcccgcccttaccctaaatcaattaaaatgacgtttgggcaccgttactatttgcgcctcaacgtctttttacattttatatctatataagtgaacaaaatattgccgcgcttttgcctgctgcaaaaagtcatcatcaggcaaattggtgcccgggctttgcaaaaacttaagatcattttgtatcatgtgcattttagcgtcaccgcaaacctttatctgccggctattttctcgaaacagccgcctcgacttcgctcatcggaataccaagtgcgcgcgcgacgccctcgccgtatgccggatctgcataataacagttcgcaatatggcggagctggacttcttttgtcgttccctgcatgctacgtgccgtgtttgcaaacagcctgtgctgttcttccgccgtcatcagcctgaacaatttgccgggctgttcgtaatatttgtcatcatcttcacggaaattgtgatagtcggctgtacctaaaatatcgagtgccggttctgcgtgttccttgctgtcttcccattcgccataactattcgggctgtaggagacggagccgccttcagccggattgaaaacccgcattgcgccatcgcggtggtacggatggaagtgttccgcttttttcggatagttgacagggatttgccagtggttgacgcctaaccggtaacgttgcgcatcgccgtaagagaaaaggcggccctgcagcattttatccggcgagaacccaatgcctggtacaatattggtcggggcgaatgcggcctgttcgacttccgcaaaatagttttccgggttgcggttcagttcgacgacacccacttcaatgagcggaaagtctttatggtaccacacttttgtcaagtcaaacggattatacggcaggtttcttgcctcttcttccgtcatcacctgtatgtacatcgtccagcgcggatagtcgccgttttcaatcgcttcgtacaaatcgcgctgatggctgtcacggtcgcggccgatcatttcctgcgcttcttcgtccgtgaggtttttgatgccctgctgtgttttaaaatggaatttgacccagacacgttcgttgttggcgttgaacatgctgtacgtatggcttccgaacatatgcatattccggtagcttgccgggatgccgcggtcgctcatcgtaatcgtcacctggtggagcgcttcaggcagcagcgtccaaaaatcccagtttgcctgcgcgctgtgcatattggtgcgcgggttgcgtttgacgacatggttcaaatccgggaaacgtttcgggtctctgaggaaaaatacaggcgtgttgttcccgacaaggtcccaattgccttcttctgtgtaaaatttcatcgctgtcccgcggatatcgcgttcggcatccgccgcgccgcgttcaccggcaacggttgagaagcggatgaacatatcggtttttttgccgacttctgagaagagttttgccttcgtatattgcgttatatcgtttgtcactgtgaacgtcccgtacgcgccggaaccttttgcatgcatccgccgctccgggatcacttcccggtcgaaatgggccagcttttcaataaaccagacatcttccatcaataacgggcctcttttgccggcggtttttgaatctgtgtcattcggaaccggggcaccgaatgcagttgtcatttttttgttgtctttttgatcactcatcatgttcccaccttttgctatttgatatctatattataactggttcattataaaaatcaatatttatttataataaatttaaagtaaagattatcatatcaaaggaggactaatagaagtgtgagggaaatgtgctattcatagtagctttgccgggcattttttggtataaataagttaaacgactggatgaggatgaatcacatgctgaatgagaagccaaacctggagaacgatgcatcttttcatattccggaaagcggtttattatacatacaaaaaacgcaggctgtcattgaatatatgacgcagaaatcctgtgtatacgaagttctttcggagtatttaatgattccgtttgaagcaaaggatactttatttgatatcataaaagatatgcccgaaacggttgatcttttcaccagtgtccatccgtccggatccggattttcgacgctctccctgccgctttctcaattgaaagagcgcatccgctatgagatgctcgtgaaagtgattatttccgacagcctgacaagttattttcagccgatcatccgcattcaggacaaccaaatatacggctatgaatctttgctgcgcacccgtttgccgaaccggaacattcccccaggcctgttatttgatgccgcccataaaaccgggctgcattcgttattggatttgcgcgctagggaagcggcactgaaagcccgtgctgagaaactgccccgcggcgtgaagagctttatcaattttttgcccgcttcgatttatgattacaagttttgcttgcggcatacgttcactttgattgaacagtacgatatttcccccgaggaccttgtttttgaagtcgtggaaaccgagaagatcaacgatatccactttttaaaaaagatactcgggatttaccgtgatcttggcgtcagcgtggcgcttgatgatctcggttcggggtacgcaacgcttgaaactttgaaaatcttaaatccgaactatgtgaaaatcgaccgtttttttatttcccattgcgacgagaataaggtcaaacagcgctttttgcaggaagtcatgaaaattgcgggagaaaccggcatttatgtgctggcggaaggaattgaacgcgaagaggaactgctctattgcaaatcgatcggcatgcatttggcgcaagggtactatattggaaaacctgcccctgaacctgctgtaacaatgcttgggaaaaattaggacttgccgggttgtgcagcagccatttcttgcagcgtttgctaaaaaagtgaatcttcatgcgtttacggggctggacctagaggataggtcagctttttttaatgcctttagggaaccggcaccgtttccgttcatgcagaaaaaagaggttgcccgggggcaacctcttttttcatgcttcttccggatgtttttcttttttcctgaacttcattaaaaattcgtagacaaccgggacgatgatcaaagtcagtaaagtggagctggtcaagccgccaattactgtgatgccgacccctttcgaaatgagtccgccgccgccgtagcccagagcaagcgggatcagggcaaagattgttgcgaaggcggtcattaaaatcggccgcagccttgttgcgcctgcttcaagcaatgcttcgcgggtggacagccccgccttttctttatgcaccacccggtcgatcagcacgatggcattcgtcaccacgatgccgatcagcatcagggcgccgatcatggcggtgacgctgatcgtttcatgcgccaggaacagggctatgagtgcaccgatcacggcaaacggcagcgagaaaaggatggtaaacggcgcgagagccccgccgaatgtaatcacgagcacaagataaacgatcgcgacagcagccagcatcgcgtaaccgagctttgtaaacgagtcattgatgtcttccgttacgccgccggtttcgacatggatgtattttggaatatcgagtttatccactttgttttggacttgttgtgtcactttcgcaacgtcagctgtcttgatcttgccggttacactggcatagattttgccgtcccgttttgtaaccgcatccggtgtttcgccttttttcacgtccacgacatcttttagcgctacttttgtgccgagcggcgatgtgactttttgattggtcaggtcgccaatattgccgtaatgcccggttttgttctgttcatatacgtttaattcctctccgcctttttcaatggttgtcagcacggtccggttgccggtttgcgcaaggccggttccgagctggccggctgttaacccgagggcggccagtttgtcctggttggcgacaagcgtgtattgctgatacgtttcggaaaggctggtttcaacatttttcaagttgtcattgtttttcatgactttttcaattttatggatgaccggtttgatttcatccagatcattgccatagacatacaacgttaattcatcattcgacatggacgcgaagtcctgtgatttccatgtcccctggtccgttctttgttgcagagctttgatgaccttttccggttcgcggtcgaaatttttggtgccctggtcatattcgacaacaaagatggcggagttgctgtttgtgctgaaagccgactccccaatggaatactgcacattttttacatttttacggtggattaagtaatcctccgcttttcctgtaatcttcttcacgtcggaaagggtttcccccggttccggcgcataggtggcatacacgactttctggccttcgttttcaataaagctgacgccgataagcgggattaaaaacagactgccgatcagaagcaggcatgcggtgccgaacgtggccagcttatggttgagcgaccagttcagaatccttttataaaacaaagcgagcttgccgtggccttcgttcgtggtccgcgtgtttttcttcagcccgttcttaaataacgaatgggcaaacatcggcaccaccgtgatggccacaagaagcgatgccagcagggcaaaaatcagcgtcagggcaaacggcatgaacagctccccgaccattcctttcacaagtgcaagcgggagaaagacgatgaccgttacgatcgtggaagacatgaccggtttaaaaacttcaaccgtcgcttcacggatcagcgcttttccgcgcagtttttcttcccgcagcgtcaagcgcctgtaaatattttcaatgacgacaatcgagtcatcaataacgcgcccgattgccaccgtcatggccccaagtgtcatcacgtttaatgtgatgccaagctggtgcaaaataataaaagcaaccagcactgacagcggaatcgaaatgactgcgataatggttgaacgcacattccgcaaagacagcaggatgaccacaatcgcaaacacggccccgatgattgctttttcaaacatcgttttgacggagtctttgataggtgttgcctggtctaaaatggtggaaatttgcgtgcctttatagtccgctttaaactgtgcggcttttttatttactgcatcggcaacattcaccgtgtttgcatccggagcttttgtaatctggatgccgattgaatctttcccgttcgtttttgaaatcgattcatgcttgccgacaactttgatatcggcgatttcttttaacgcaacggccggcataccggtgttggcttgcgttcctgaagcctgtgcacccgaggcctgtgtccctgaggcttgtgcagcacccggggattgtgtccctgaagcctgtgcggctgcggacgaagcggaagctgcacccgttttcggggtgtacgggattttcagattctcaaaatgcttcagcgatttcacgtttccatcgatttctactgatttgttttctttcccgaagttgatgaggccgagcggtaccgaaacgtttgagccctggatggcctttttgactgtatcctcatcgagccccaatgcattcaatttgtcctgtttaaaggccagctggacttcctgcacatactggccggaagcctgaacatcggatacgccgtcaatgctctgcagttttggaacaagatcttcttcgacaattttcgttaagtgctggaaagaccggcttttgtccgagacacttaaagacaggatcggaaaatcattgatgctgatccttgttacggacggcttgtcaatattatccggcaggtccactttttccagcgcgtcctggatgtcttttttcgcttgatccatatccgtgccatatttatactcaagctggatctgggaattgctttccgtcgaggaagtggagaccgtattgacgccggtgaggtttttcagccgttgttcgatcggttgcgttattttattttcgacttcttccggtgtggcacccggatcagaggctgtcaccagcatgtatggcgcgtcgatattcggaatggtttccattttcatattcatgccggcataaatgcccgcaccagccacaatgagggtcatcagccaaatggcaaatttgttgttcaggcaaaactggatggtcttcttcacagtgtttacaacactcctttgtctgttcgttacagggccggagaaaaatgggcgacctatctccataatagttatacctttaaacccggaaatgcgccagtattttccggtatgttttataaatacaggagagaatggcagtacttgatgcatcgcttaagaaaaaatattggaaatgaaggactgcctaaaaaaagaaggttgaagcctttgcgcctcaaccttcttcctatgtcattagccttttaccggctgttatttccacgcatgcctgaaaaaattttaaacagcagcacaattgcggcgatgacaagcagaagatgcacaaaggcaccggcaatgtgaaaaacgatgcccaaaatccaaagtacgagcaaaatcccgatgattgtccagatcatatagccttttcctttctaaattaaagtacttttatgttacccgttccgttgcttttcaaacttttgcttgcatgtttgccgggcatgcgggtggggaaagatactgggaaacggggggattgtaatgaaaaaaagcggaaagaaatggctgttatgcgggttccttgtcctgcttgccatttatgcggctgtgatgttgtaccatacatataagccgctgccaaaagggatttcctatgaaggcaaaacatataccgtccatgatcaagacatccgttttctttcggatttaacataccgggaaaaggggacgggaaaaagaaaggtggagcaggccgtctatcctgaaatttaccggatgattgaccaggcccatcaatttatcgtcgcggatttattcctttttaatggctaccatgatcaaaagatgaaagtgccgccgctggctgaaaggcttgcagaccggctgattgccaaaaaagaaaaagaacccggtgtccgcatcatcgtgatcaccgacccgatcaatacctcctacgggtcccatgaagccggcattttaaaacggctcaaggaacatggcattcgtgtggtctttacgcatttggacccgttacgtgacccgacgccgctttattccggtatttggcatatgtttttccagtcgtttggccagggcgggaccggctggctgccgaacgctttcggggacaatgcaccgaaaatgacgctccgttcgtaccttgaacttttcaatattaaggcgaaccaccgcaaaacgtttacgaccgaaaacggcacggtcattgcatccggcaacccgcatgacgcaagcggctggcattccaatatcgcttttcttgttaaggggccggtcatccgtgatgttctggaatcggagcaggcggcttccaatatgtcgggcggcccggaactgccgcaatataaagggaaagagaggggaaaaggcaggattgccgtccagctgttaacagaggggaaagtttacggccggatcatgaaagaaatcaaagcggcaaaaaatggtgattcgatttcaatggcaatgttttatctggctgaccggaaagtggtccgtgcgcttgaggaggcatcttcccgcggcgtccgcatccggcttatcctcgacccgaatttaaatgcgttcgggcataaaaaaatcgggctgcccaaccagcctgttgcacaggaactcgtaaagaaaacggatggaaagatcaaaatccgctggtacaacaccgggatcgagcaattccatccgaagctggtctggattgaaaagcccggccgttcgctctttttcggcgggtcgaccaatttaacgctgcgcaacctgggcgattataatttggagactgatttatttgtgaaggcaccgaatgatgcggccatcacaaaagatatccgccggtacttcgggcggctgtggaacaatgaagatggcaccttcactgtctcctacaaaaaacacgaaggcttctccacttatttgttaaaaggcctttaccgccttcaggaagtgctgaaactgacaacgtattaaaaaagcccggaaagccttccccggcttcgggcccttttagtcaagtccaggttattgtgtaaatttatgggcaaatgttttcaaccaccccttcattttttcggcttaacttccatgggtttttttcttcatctccgggaagggatgtcaaatgcctttcaatttgacatcccttcccggagatgaaatcatccatgatggaagttaagctgaaaatgctgctaactattctttcccataagtgacttcctcttcgagtattctgtatcttgatactgcattaaaacggcaccaaccaaacgaaaagcagattgggtattaggaaaaatgcgaatgaccctttcccttctacgaacttcttggttaagccgctcgnnnnnnnnnnnnnnnnnnnnnnnnnnnnnnnnnnnnnnnnnnnnnnnnnnnnnnnnnnnnnnnnnnnnnnnnnnnnnnnnnnnnnnnnnnnnnnnnnnnntccgggaagggatgtcgaaccactttcaatttgacatgaaggaaaggttgtgagatcatccatgatggaagttcagcgcaaaatgctgctaactattctttcccataagtgacttcctcttcgagtattctgtatcttgatactgcattaaaacggcaccaaccaaacgaaaagcagattgggtattaggaaaaatgcgaatgaccctttcccttctacgaacttcttggttaagccgctcgagggaattagtactccgtatgtgcatacggatattctcaggaaagttcatgtattggatagtatcttcaaaaccttcatctaaaatggccagggctttttcaaatcttgcttctgtaccaaatttgtttattaattcatctttaaacttgcgtatgtcctcaatcgtaacggcctcaaacacgcgcttaatcatcacccggatttctgcagtatcttttttgggcagtttttcaatgatattgcgtttaaaatgaacattgcacctttgccaagcagtgccaatgaattcccgttgtattgctttctgaaggcccatgtgagcatcggaaataacgagttttggtgattggagtccacgtgatttaagttgtttaaaaaatgaactccaactctccaaactttctgcatggtcaacgcttaaacccagtatttcacgtgtattcttctctgtaatggcagtcgcaatataaacagcctttgatatgaccttatggtgctcccgtacttttatatacatggcgtccacaaacacataagggtagtaggttgtattcaacggtctctcggcccaagcattcacaatgggatccagtttttgcgtaagggaagagacaaacgacttggatacattcttaccgcaaagctgttctacgacatttgtgaccttacgggtagagacgccattgatgaccatctccaacattgaaaggacgaaagcttggtcacatctggcatacttttcaaataaggtagttgagaattcgccattacgtgtccggggaacttttaatgtaacattgccgatgctcatcaacagctcgcgttcatagtaaccgttccggtaatcccggcgttcaacagcgcgttcataagggctcgtttttaaatagtcatccctttccttttccataaactcgtttaacacgaggacaaccgctgatttaattaccgcgtcaagatcggaagtcatgagtatgtgtaaaattttacacaattatacggacttaatcgccctttttttacaatgcgacatcatttaaaaattcgcgtacctcttccggcgactttgcatttgcactgtgtagatgcgcttttttctcgccgttttggaaaacgagcaggctcggtatccccatcacctggttttcatccgcaatcgcacggaactcgtcgctgttgatttcataccatttatattgcggatagtctttgatcacatcaccaataaacatatccatcactttgcaatccggacaccagtctgcataaaatttcacgataaccggcgcttctcctcccgttaccgtgttaaattcttccgcacttttaatcgcttccacttccagaccatctccatcctttatcatttctttcttattgtataaagagcggcaggcggatttcaacatttttcaacctgccaaagaaatatttccaaaacgaaaaggattgtgcttcgtcatgtatgatgtataataaagcttgtatgaaaaaatgatgggggccggttgttttggatccgtatcatttattttattttacggccggcggttccggcattgagaagtcaggtgatggaattgtcttcgcgggatgaaggttctaaaattgattacgggctggttttaacgctgatgttgttctgcattgtcagccttgttgccatttatacggctaacagcagttatctgataaaacaagtcatcaactatgtggtcggagcaatcataatagcattggtgatccgccttgactccgaccagctgaaaaaaatatcgtggtacggttacgggttcgggattttgctgttgatcttgctgattctggcgccagccagcattgctccggagcgtaatggcgcgaaaaactggtttgtgctcccggtgattgggacattccagccttctgaaatcatgaagccatttttaattttagcaatggcacgccttatttcggatcataatgaaaaagtgctgaaccggtcagtgaaatcggacttctggctgtttgtgaaacttggcatctgcttgttcgtgccgctcatgttgaccattcaacaggatttagggacgtcacttgtgtttattgccatttttttcgggcttgtatttgtgtcgggcatcacatggaaactgatgcttccaattttcggcagcggcgcggcactggcgggactgattttttatctcgtcctctggcagccggcacttctcgaaaaatatcttggtgtccgttcgtaccagtttggccggatctatgcctggattgatccttataactattccaatacggacggctaccacttgattcagtctcttttggccattggttccggccagacgtttggaaaagggcttggcacaaccgaagtgagccttccggaaaaccagacggactttattttcagcgtgatcggcgagcagttcggctttatcggcggtagcattgtcatcggcttgttttttatgcttatttaccatatcataaaagcagggcttgagacgaaaaatgatttttattcctacatttgcgcgggtgtcattgcgatgattacgttccacgtgtttgaaaatatcggcatgacgatacaggtgctgccgattaccgggatcccgctgccgtttatcagctacggggggagttcgctgatagggaatatgcttgcggtcggatttattttttcaatccgttaccattacagaaaatatatgttttccaacgaaaaataaaaaaacaggcggccccgtgccgcctgttttttgcggctattgcaccttcccgccgtacgggaactgcgaagcatagccctggtgctgctggtaagactgctgcagtttttgctgttctgctgcttccatactgtaccagcctttttggaacatcgtctcatacaatttgcgctgctcattctgtgtttccgtaaaaatggccaggagatcgcgatacagtttttcgtggctcgcttcgttcatggcggtatgataagaagcagtcatgtatttttccatcgaaagcaggtcattggcaagatcgcggtcgttcatttccggtgtttcaggaaattgtgttttcgggttttgaattttttgctgctgctgttgggaatccatatgttgtacctcctttttaaaatggtcgtatgacgcgcgctccgcattcaggtatctctgccgccaaacccgggcagggattgggctgggcagctcccgttttccgttaagcccggctgccggagcagtcagtgcttgcttcaggctgggaagtgcggttgccccggacggacagcctcccttcatgcaggcttttttctagggatcgggctgtgcgcgcattccggggcgggctgcgaacgcctgcttttcatgaactggaaaagcgggtttcgctttttgtggcgggccggcattcttttttgttattgcaagtggcttttcaaatgccccaaaatctggttgtagtggcgctggtgcatttgcccgcacgcttcaaaaacggctttcaattcattgtcctggcagcgtgttgccgcatcatgcgcttttttcatcgccagcagattccaggccagcatatcatccacataggccaaatcttttgttgacatacgatcgggcggagcgttgtaaaccgtttgcccgctttgctgctgtgaaaaaggctgttgttgcattccatttcctcctttatccaagtctccctttattgtttgaaggagctgcggatcctatgcagccgcctgcttattttttgtactggttgttttggctgtttacttttccgccgccgtcacgctccactgtcgggccggcatttccttttacgcttgccgcgctcacacccgcttttgacgggtttttcttcagcttcgccattggttcacctccccgcgattttcgtttagcttgcccaaaatggtatgggcatataaaaaattttaaaaaaatggcgattttttgagatgaagtgattgatagaatgaaaaaattcgtatatattattattaaagatgaaagcgttatttttttaagcgcttaatgaatgagcattcattcaaaagaaaggggatgcactatgcggtataccattcaaaaagcggctgtcatcggttccggcgtgatgggatcgggcatcgccgcacatctggcaaacatcgggattccggtatttttgcttgacatcgtcccgaacgcactcacggaagcggagaaagcaaaggggtacacattggaggacaaagccgtccgaaaccgcttcagccagtctgcgctgcagaagctgttaaaacaaaaaccggccccgctcacatcgaaaaaaagcctcgcgctcatcgaagcgggcaacctggaagacgaccttgaacggctgaaagaagcagactggataattgaagtggtcacagaacgtttggatattaaaaaatcagtatttgaaaaagtggaacgcttccgccggccggggaccattgtaagttcaaacacatccggcatttcgatcgaagcgatggcagaagggcggagcgaagatttcagaaagcattttctcgggacccacttttttaacccgccgcgctatttgaaactgctcgaagtgatcccgaccgctgacaccgacccggacgtcacttcatttatgaagcagttcggcgaggacgtgctcggaaaaggcgtcgtgcttgcaaaagatacgccaaactttattggcaaccgcatcggtacatacggcctgcttgtcaccgtgcgggagatgatgaaaggcggctacacggtcggcgaagtcgattccgtgacaggcccggtgattggccggccaaaaagcgcaacatttcggacgctcgatgtggtcgggatcgatacgttcgtccatgttgcgaataacgtgtatgaaaaaacggaaggcgaagaaaaagcagtttttaaagtgccggcattcatgcacaaactcgttgaaaacggctggcttggcagcaaaaccggcaaaggcttttatgaaaaaaaaggaaaagaaatctatgaattaaatccggaaacactggaatacggcgaacgcacgaaaatgaaagcggcttctttggaggcggcccggcaggcaaaaggaaccgccaataaaatcaaaacgattgtgtatgcggatgaccgtgccggacagctgctctggaatattctcgcgccttgccttgtgtattcggcagaactggccggcgtgattgccgacgatattctcgccatcgaccaggcgatgaaatggggcttcggctggaaattcggcccgtttgaaacatgggatgcaatcggcgttgaaaaatccgtgcaaaaaatggagcaggacggccttcaagtgcccggctgggtgaaaggcatgctggaaaaaggctttacgtctttttacaaagaagaaaacggcgccgtctcgtactatgacaacggagcatacaagccggttccagccaatccgaaagaaatcaatctcaaaactttgaaaacgcagggcaaagtgctgaaagaaaatgccggcgcaagcttaatcgacatcggcgacggggtgctgctgcttgaattccattcaaaaagcaacgcaatcgggctcgacattttgcaaatgatcaattatgccgtggacgaagcagagaatcattacaaagggattgtgatcggcaaccagggcaaaaacttctgtgtcggcgcaaaccttgctttgatgctgatggaagcgcaggatgacaatatctttgaacttgacatggtcgtccgccagttccagaacacgatgatgaagatcaaatacagccaaaaaccggttgttgcagcaccgtttgcgatgactttgggcggcggcgcggaggtgtgcctgcatacggcgcatatccaggcggcaagcgaaacgtatatgggccttgtcgaaacgggcgtcggcctgcttccgggcggaggcggcaacaaagagctgtacatcaagcatttgaaaaacattccggaaggcgtacagttcgacttgcaaaatgtcgtgaacaaagtctttgaaacgattgcgatggcgaaagtgtccacttctgctgaagaagcgcgcgagtccggcttccttgaccggacggacggggtcagctttaaccaagaccatctgatttatgatgcaaaacaggctgtgctgcgccttgctgacgcagggtacaaaccgcctgtccgcgaaaaagtgccggtcacaggcgaatccggttatgcagcgttgttgcttggggcccagcaattgcatctgtcgggctatatttccgactatgaccttgaaatcgcgaaaaagatcgcctttgtgctttcaggcgggaaagtgccgttcgggacaaaagtggatgaacaatacctgctcgatttggaaagggaagcgttcctgagtctgattgcacagccaaaaacacagcagcggatgcagcacatgctgttaaaaggaaaaccgttacggaattagagccccgcggattggcgaatgccggtcccctggcaggaaaagattccgcccgaatttttcatatacaacataaaggggttttcccggggaatgcaactgtatatgggaaaaccccgatccatcaccccaggcggtgatggaagggccttttacaaaaacacggaaagaggggaatgtgatgagggaagctgtcattgttgcaggggcgagaacgccggtcggcaaagcgaaaaaagggacgctcgcacaaacacggccggatgatctaggtgcacttgtcgtaaaagaaacgttgaaacgagccggcaactatgaaggaaatattgatgatttgattatcggctgcgccatgccggaagcggagcaggggctcaatatggcgcgcaatatcggggccctggcaggattgccggatacggtgccggccattacgatcaaccggtactgctcgtccgggctgcaggcgattgcctacggcgccgaaaggatcatgctcggccacgctgacacgatcattgccggcggtgcggaatcgatgagccttgtcccgatgatgggccatgtcgtccgcccgaatgtgcgcctcgcagaaactgcgccggaatactatatgggcatggggcatacggccgaagaagtcgccaaaaaattcggcgtcagccgcgaagaccaggatgccttcagcgtgcgcagccaccaaaaagcggcaaaagcgattgcagaaggcaaattcaaagacgaaattgtgccggttgaggtcacattgcgttcggtcggcgaagacaacaaacttgttgaaaagaaagtcgtcttttcgcaggatgaaggggtccggccggatacaaatgtggaaacgctcggaaaactgcgcccggcattctcggtaaccggaaccgttacggccgggaactcgtcgcaaacaagcgacggcgcggctgcggtgatgctgatggataaagaaaaagctgaatcgcttgggctcaaagcactgttgaaattccgctcgttcgcggttgccggggtgccgcctgaaatcatggggatcggcccggtggaagctgtgccgaaagctttgaaactggcagggttggaacttgaggatatcgggttgttcgaactgaatgaagcctttgcttcccagtccatccaggtgatccgccagctcggcctgaatgaagacatcgtcaatgtcaacggcggcgcaattgccctcggccacccgctcggctgcactggcgccaagctgacgttaacgcttgcccatgaaatgaagcgcagaaacgtgcagttcggcgtcgtcacgatgtgtatcggcggcggtatgggtgcagctggtgtatttgaactcgtgtcttgatggcaatggaccaaagcaggcggccatccggtttcaaatggaaacgtgcaggtaccggaccatggcaaggttttgaaatggatggataccagggctaaaagcagagcagcaggttccaagcggcaagagaccggaccagggtaaaaagcggatcagctgtctctatcctaaaaatatacgctggatgattttcatttttccgctggtgccgcgttcactgcagaatgggcgtttaaaggcaaaacgccggagcaggacctggcctgttgaattgtttttaatggagataagagccgcggagcacatctgcggccgctcattacagataaaaaggagaggaattgtaaatggcgaacaaaacggatgcatttgtaaaaggcggcagttttttaattgatgacattacaccggatcaagtatttacgctggaagagctgacagaagaacaaaaaatgatcgccaaaacggcggaagactatacgaacaatgaagtggtcccgcaaattgaatatctggaaaaccatgaatttgaccgctctgttaaattgctgaaaaaagcaggcgaactcgggcttttgagcgccgatgtgccggaagaatacggcggcctcgcccttgataaagtaagctccgccctgatttccgaaaggctcgcaaaagtcggcggctttgccatctcccacggcgcgcacgtcggcatcggctcgcttccgatcgttttgttcggcaacgaagaacaaaagaaaaaatatttgccgaaactcgcaaccggcgaatggcttgcggcttatgccttaacggaaccaagctcggggtcggacgcacggagcgccaaaaccgttgcaagattaaacgaagccggtacgcattatattttaaacggggaaaaacaatggatcacgaacgccggctttgctgatgttttcaccgtgtatgcgcagattgacggcgacaagttcacggcctttatcgtggaacgcacattcccgggcgtttcaacgggcgcggaagaaaagaaaatggggattaaatcttcttccacaaggacgcttatcttggaagacgtgccggtgccggttgaaaacgtgcttggggaaatcggcaaagggcataaaattgcatttaacattttgaacatcggccgttataaactgggcgtcggcgcggtcggctccagcaagcacgtgctcgaaatcgccgtcaaatacgcgaacggccgccagcagttcaaaacgccgatctcgcagtttaacctgacaaaagaaaaattcggcacgatggcatccaaactgtacgcagccgaaagttccgtctaccggacagtcggattgtttgatgaaagaatgagccattttacgccggaagaagaaaaagacgggcgggcagtggccaatgcgatcgccgagtatgcgattgaatgctcgctgaacaagttctttgcttccgaagtgctggactatgtcgtcgatgaagcggtgcaaatccacggcggttacggctttatggatgaatacgaagtctcgcgtgcctatcgcgattcccggattaaccggatttttgaagggacaaacgaaatcaatcgcctgattgtgccgggcacatacgtgaaaaaagcgttcagcggggaactgccgctgttgcaaaaagcgcaaagcctgcaggaagagctcatgatgatgatgccggaacaagtcggcgacgcgccgctcgagcaggaaaaatatctcgtccgcaacatgaagaaggttaccctgcttgttgccggtaccgccctgcaaacgtacggcaaaaaattcgaaaacgaacaggaactgcttgccaacgtggcagatctcgtttcgaatgtatatgccgcagagtcatgcgtgctccggacggaaaaagcaatcaacaaagacggtgccgaaaaacataaccaaaagctgctctatacccaaattttcactcaggaagcgttcaatcaatgcgaacaaattgcaaaagaatcgctcgcagcctgccttgaaggcgaccagctgcaaatgacgctttccgccctccgcaagctggcacgccatacgccaaccaacgtcattgcgaaaaaacgcgaagccgcggatagaattatcgaagcagaacgctatgtgctgtaatgcaaaaagggatttccggcccgccggagtcccttttcttttgcatcgccggggaaaatcggctaacatacagataagacaagatgatgacaggagtggacaaaatggcccttactttctattggtatccgaaatgtgggacttgccggaaagcgaaaaaatggctggacgaacatggcattgcctatgaagcggtgcacattgtcgaaaatccgccttcaaaagcgcttcttaaggacttttatgaaaaaagcgggctgccgatcaaaaggctgttcaacacaagcgggcagaagtaccgcgaactcggtttgaaagataagatcccggaaatgagcgatgaagaagcgcttgaactgctggcttccgacggcatgctgatcaaacggccggttcttgcgggcgatgcctttgccatgttcggctttaaagaggatgcctatgaaaaattattgaaaaagtgattgatttaagtgcttgttttcggtaatttaaaactgaaggctattacggatacataacggagggattgagatggcggtacctgaagaactgcggtatacggatgatcatgagtgggtgaaagaagaagacggccatgtccggatcggcatcactgattttgcccaggccgaactcggcgatatcgtatttgttgaactgccagaagaaggcgatgaagtttcggcgaaagaaccgtttggcagtgtcgaatccgtgaaaacggtgtcggaactgtacgcgccggtcagcggcaaagtcgttgcggttaatgccgacttgagcgataacccggaattcgtcaacgaatccccgtatgaaaaagcgtggatgattgtcgttgaaccggccgactctgctgaactggatgatttgctgacggcggaacagtacgaggaaatgatcaacgaagcataaaataactggcactgcactccaagctgcggtgcctttttgtgtaaaggatggattgccatgcaggactggacaagggaaaaacaactggaggaacggattttgcaggaagaaaaactcgccctgtacttttacacgccattatgtggcacatgccagctggcggggaggatgctggagattgcagaacaggccgtcccccgctttccttatgccaaagccaatctgaattacgtgccacaaatggcggaaaaatacaagatcgaaagcgtaccgtgcctgctcctccttgaaaacgggaaagcaatagacaaagtgtacgcttttcaatccgtcccggcattatttgaaaaattgtcttctttttaatgagaaaacggcggaacatccgatttgggcattcataaacggaaacaccgcttgcatggcggaaaaaaacgggcaggcttttgcgcaaaaacgccgttcaaaccgcagaaaaaacttttttcagacactgttcgagcattgccgccaaaaccggccggaaaagcgcgcgatttgttgaacgattccggcaggatcagcgctacccgtgcagaataggtaaaggaaatgaggattggagcgtgttgccatgaaacggaccatccagtttttcctgaacagcctggcacggaaaaaacaattgcggatgctgctgccggcggtgcctgttaccgtatcgttccgcacaggggaagaatgcttgctcgttgctttttccaaggagtgttgcgtgcagcttgaaaccggcaaagcggattttgaactggaaatggcgctccggcaattcgaacagcttctgtcccgccgtgcgcgcctcgggacatttctgaaaatgggcgaactccggtacaggggaacgtatcgccattttttattgctggaatctttattctggcttgcgggaactccgcaacctgtgccaaaaagcaaagccagatccgcctgattatcaaataacagactgaaaatgagaatcacagcataaccgggattgcaaaacaaatcccggctttttttatgccgtttcaggcggctgcccggattcccaatgcgcaatccagggaaattcaagaaatctgtatcaggaattttataccggctctattttgtgctattattaatgaataagcaagaccggaaaaccgcggaaaaaagatggcatgccatggttatccacaggtttttactagttgcgcatagttttcatttgttataaaataataatgagaataaattaagaataaattggatctgaatatacaaacaacggaggaattttttatggcaggatcaaaactcgtaataaaagatcttcacgtcgaagtagagggaaaagaaattttaaaaggggtcaatctggaagtaaacagcggtgaatttcatgcgatcatgggcccgaacggaacagggaaatcgacgctgtcttctgccattatggggcacccgaaatacatcgttacccaagggaccatcacgcttgacggaaaaaatgtgctggaaatggaagtcgatgaacgtgcgaaagccggcctgtttctcgcgatgcaatatccaagcgaaatcagcggcgtgacaaatgcggaatttttgcgctcggcgatcaatgcgcgccgcggcgaaggcaatgaaatcccgctgatgaaatttatccgcgagctcgacaaaaagatggaatttcttgaaatggatacgaacatggcgcaacgctatttgaatgaaggcttttccggcggcgagaaaaaacggaacgagattttgcagcttatgatgattgaaccgaaaattgcgattctcgatgaaatcgactccggccttgacatcgatgcattgaaagttgtcgcaaaaggcatcaactcgatgcgcagcgaagatttcggctgcattatcattacccactaccaacgattgttaaactatattacaccggatgccgtccacatcatgatgcaagggcgcatcgtcaaatcaggcggccctgaactggcaaaccgccttgaagcggaaggctacgaatggattaaacaggaacttggcatcgaagacgaaacggtcggccaggaagcttaagcagggggcgagagacttgatgacagaaacgaaattagcaatgaatgagcaagatgtccgcaccttttccgaacaaaatggtgaaccggaatggctgaaggagttccgcctccaggcattagcccgggcccaggtcctgccgcttccggaagtggacaagacgaaactgaataaatggaactttacgcaatttaccgatttcagcatggaaagcgcagcctacagcactttgaatgaactgccggaaaaagtaaaggtgctcgtggatcttgaaaacgcgaagcaaaacttgtatatccagcataaccagacaccggcttatctgtccttgtcggaaagcgcgaaagcacaaggcgtcattttggccgatattttgacagcagtgaggacacatcctgagctcgtccaaaaatatttgatgacagaggcggttaagcctgatgaacatcgtttgacggcgctccatgctgcgctgatgaacggcgggacattcttatacgtgccaaaaaacgttgtgctcgaagaaccggttcaggccatttatgtgcacgaccatgaaacagcgccgcttttcaaccatgtgctggtggtcgctgaagaaaatagtgccgtcacctatgtggaaaactatatttcggcaaacgatggtgcaaaaggcattgtgaacatcataacggaagtcattgccggctccaatgcaaagatcgaatacggcgcggttgatgcgcttgcaaaaggggtcaccacgtatgtgaaccgccgcggttacaccgggcgcgatgcccaaattgaatggtcgctcggcatgatgaatgacggcaatacgatttcagacaatacgaccaatcttgtgggcgacggatccgtttcccattccaaaaccgttgtggtcagccgcggcaaacagacgcaaaactttacaacgcgcattacccacttcgggaaaaatacagaaagcttcattttaaaacatggcgttgtcaaagacgcgtccacgatgatttttaacgggatcggcaaaatcgagcacggcgcgagcaagtcggacgccgagcaggaatcgcgtgtcctcatgctaagcgaaaaagcgcgcggcgatgcaaacccgatgctgctcattgatgaagacgacgtcatggctggccacgccgcatctgtcggccgtgtcgatccggtccagctttactatttgatgagccgcgggatttcaagaattgaagcggaaaggctgatcatccacggcttccttgcaccggttgtcaatcagcttccgattgaaagtgtaaaaaaacaattgacggaagtcattgaaaggaaagtcagataatggatatcaaagaagttcgccggcagtttcccatattggaccaggaagtaaacggccacccgcttgtttatttagacagtgctgcgacttcacaaaagccgctccgtgtcattgaggccgtcaaccaatattaccgggaatataattcgaatgtccatcgcggcgtccatacgcttgggacaaaagcgaccgaccattacgaaggcgcgcgcgaaaaagtccgcaaatttatcggcgccgaatcaacggaagaaataatttttacaaaagggacgacagccgggctgaaccttgttgcccgcagtttcggtgatgcacaagtacaggaaggcgatgagatcgtcattacctacatggagcaccacagcaacctgattccgtggcagcagctcgccaaaagaaaaggcgccgttttgaaatatgtgccgatgcaaaaaaacggcacgttgcggcttgaagatgtggaaaaaacggtcacggagcggacgaagatagtggcagcagcacttgtctccaacgtgctcggcacgattaacccggtaaaagagatggcgaaaattgcacacagccgtggtgcttacatggtcgtggatgccgcccagggtgcgccgcatatgaaagtggacgtaagggatcttgactgcgactttcttgcattttccggccacaaaatgtgcggcccgaccggcatcggcgtcctgtacggcaaaaaggcgctgcttgaagagatggaaccgctcgagtacggcggcgaaatgattgattttgtcggcctgtacgattccacctggaaagaacttccgtggaagtttgaaggcggcaccccgatcattgccggtgcaatcggcctcggggaagccatcgattttctcgaagaaatcgggcttgatgaaatcaccgcgcatgaacaggatttaagtgcttattgcctcgggcagctttctgaattagaagggattacggtgtacggcccggaaagcgcagacgaacgcgccggccttgtaacatttaatctggaaaacgtgcatccgcatgatgccgcgaccattctcgatgcggaaggaattgcgatccgcgcggggcaccactgtgcgcagccgttgatgaaatggctggacgtgacagcgaccgcacgcgcaagcttttatttatataatacgaaagaagatattgacaaacttgttgccggtatcgtcaaagcaaaggagtatttcacaaatgtcttctaatcttgatgcgctttaccgcagtgtgattatggaccattataaaaatccgcggaacaggggcagtttggaagatggaagcctgacagtcgacatgaataacccgacttgcggcgaccggatccatttgacgatgaaagtggagggcggcctcatccgggatgcgaaatttaccggtgaaggctgttccatctcgatggcgtcggcctccatgatgacacaggccgtcaagggaaagacagtcgatgaagcgctgaaactttcccacattttctcggaaatggtgcagggaaaagactatgaagagtcggaagatcttggcgatattgaagcattacacggcgtatccaaattccccgcccggatcaaatgtgcaactttggcatggaaagcaatggaaaaaggggtaagaagcgaaaaaggattggaggaatgatggctgatggctaaaaaaatgccggaaatcggcgattacaaatacggctttcatgataaagacgtttccattttccgtgcaaaacgcggattgacgaaagaaattgtggaagaaatttcaaaaatgaaagaagaaccgcaatggatgcttgattttcgcctgaagtctcttgaacatttttacaataaaccgatgccgcaatggggcggcgatctgtccgcgttaaatttcgacgacataacgtattacgtcaaaccgacggaacatgccggccgctcgtgggatgaagtgccgcaggaaatcaaaaacacatttgataagcttggcattccggaagcggaacaaaaatacctggccggcgtttctgcacagtacgaatcggaagttgtctaccataacatgaagcaggatctcgaaaaactcgggattgtgttcaaagatacggactccgctttaaaagaaaatgaagatattttccgcaaatactgggcaaccgtcattccgccgacggacaataaatttgcggctttaaactcggctgtctggtcggggggatctttcatttatgtaccgccgggtgtaaaagtggataccccactgcaagcttacttccggatcaattcggaaaatatggggcagtttgaacggacgcttatcatcgttgacgaaggtgcctctgtccactatgtcgaaggttgcacggcgccggtttacacgacaaactccctccacagcgcagtcgttgaaattatcgtcaagaaaaatgcctattgccgttatacgacgatccaaaactgggcgaacaacgtttataatcttgtaacgaaacgtgctgtttgtgaagagaatgcgacaatggaatggattgacggcaacatcggttcgaaactgacgatgaagtatccttccgtgttgctgaaaggcgaaggggcacgcggcatgacgctgtcgatcgcgatcgccggaaaaggccagcaccaggatgccggcgcaaaaatgtaccacctggcgccgaatacatcgtccacgatcgtatccaaatcgatttcaaaacacggcggaaaagtcacatatcgcggcatggtgcatttcggccggaaagcggacggcgcacgttccaatgtcgaatgcgacacgctgattatggatcacctgtccacatcagacactgtgccttacaacgaaattttaaacaacaatatttcgttggagcacgaagcaaaagtctcaaaagtgtcggaagaacagctcttttacctgatgagccgcggcatttccgaacaggaagcaacggaaatgattgtgatgggcttcatcgaaccgttcacaaaagaacttccgatggaatacgccgttgaaatgaaccgtttgatcaagttcgagatggaaggctcgattggataaccttgatatatcaacgtttataaagggtgaacgtagggttgcgattgaccccgcgaatcgctcctgctgatatcctgctgtaaagcacggttttaaacgtgatggcagaaaaaacagccgcttgcggattccgcgcggctgtttttttcatggggcgccgatttgaaaatcgtggtaaaataaactgcataagcataaaggataaaaagcggccgtatgaaacggcatgacgagattaccctcataacgataaggggaccaaacatgaacgaaattttacatatataccatacaaatgatatccacagccattttgaaaactggccgaaaatccgccattttcttgagcggaaacaggtgcagcatgcccggcaacatgaagagatgctactgtttgatcttggcgaccatgtcgacagatggcatccgtatacagaagggactatgggcaaagcaaatgtccggcttttaaatcaactggggtatttggctgcaaccatcggcaataatgaaggaattacgatgccgcatgaggcgcttgacacattgtatggggaagcgcaatttgacgtgattcttgccaacctgtatagagaaaacgggaaacggccacagtgggcagcgccgcggaaattgtacatgacaaaaagcggtgtcaaaatcggggtaaccggtgtgacggcaggattttataaactgtaccggctgcttggctggcagctctccaatccgctggaagaacttggaaaacaaatggatattttaaaaaacgaggcggatatccttatcgtcttgtcgcatctcggcattcatgacgaccgccttattgcaaagctgtacccggaagtggaccttgttttgggcgggcatacgcaccatgtgctggcaaaaggcgaaatggacggacggacgctgcttgctgcagccggtaaatacggctattatatcggtcatgtcaagcttgaaatcgatccggctgccaaaaaaatagtctatcagtccgcccgtgctttaccgaccgggaacttccaggaaccgcccggagaaacggccgagattgaacattactattttgaaggaaaaaaattattgaatcaaaaacttgtgtatttaccggaaaaattggaatcggactggttcagggaaaaccggcttgcgggcttgctttgcgatgcggtaatggaatggtgcgatgccgattgcgcgtttttaaatgccggccttgtgcttgacagtctggaacacgggccggtcacgaaatttgatctccaccgtattctcccgcacccgatcaacccatgcctggtcgagctgacaggcgaaaaacttcaggaagtgcttctttccacgctcgacccgaaatggccgcatctggagctgaaagggctcggtttccgcgggaaaatcatgggccggtttatttaccggaatatcggctttaatcatgctttgcagaaaatagaggtggggggcaggccgctggagccggaccgcatctacaggcttggaacgattgatatgtacacatttggcgactttttcccgcatatccgtgaggcgaaaatccattattttatgccggaatttttgcgtgacgtaatggaatggaagttattgaaggaatacggccagcaggattaaatacccagacgcaaagcaaggcagcaatgcatcaatcgaagtttcctggccccgagaatcagtgatgccaacgtagtttccaagggcctttttgcggaatggggatatggcagcacagcggctggcaggaacttttcaccgcccttttcataaagtataaaagaaaggggcgaatggaaatggtaaccgtaacacctgttgagatcgggggacatacgtttatcgcgacaactgtccggctgccgaaaacaaccttgctggccgtatcgtgcgacaagggctatattatgtgcggtgcgcttgatgtgagcttgttgaatgatcaactaaaagaccgccaaattatcgccggcagggcagtcggtgtgaagacgatcgaacaattgctggaagcaccgctcgagtcggtcacccatgaagcggaaaaactcggtattaccgccggcatgatcgggaaaaaggcactgttaaaaatgatctaaacgttcgatcagactgaagcacaaaaaaaggtgttgcatgcgtctttcccgggcgatgaaggacaaaaagcagggccctaagtgtcgaaatgtccttcatcggggtgatgaaggacaaaatggagacccgggaacagcgaaatgtccttcatcggggtgatgaaagacaaaatggagagccgggaacagcgaaatgtccttcatcggggtgatgaaggacaaaacatgtgccgggaaacagcgaaacgtccttcatcggggtgatgaaggacaaaccgcattgccggaaccgccgaaatgtctttcattcacagattaggaaagacaaaccgcaccgcagccggaaaacataaaaatatccttcagcacaccaaccaggaccgcgttttttgatcataatccctcctgtacagacatatatttgctttcaggggggattttttatgcgaaaattccgcacctcaaaacggcggggaccattgccggcgcggtatgtgcttttgctttccatcgcattttttacggtgactaccattatcagcattatcattattgacgaaggcataaaaccaacattaatgcggtacgccgagtcggaaatgaaaaaaatcgcctcgtatgtcacgaacgaagcaattaaagaccatgtgagcggcggaaaaaacagcaagttggatacgattgacccgcgggaattggccgccacccagtctgaaattgaaaaccaaattacccgccaatttaaagaagtggaagaaggagacattacgtctcttgaagaaatatcaaacgacggcatgctcggcaaaaagaaaaaatcaaaacccgaaattttttccgttccgctcgggaaagtaaccaatatcgccctgcttgggaacatggggccggatattcccgtgaactttcaaatggtgggggatgttgaaagctccaatattaaagtaaaaaaagaagaatacggcattaacaacgcatttttttatatttatgttcaaatcaaaatcaaaatgcaggtcattatcccgtttgcctcggatgtcatcacttacacccatgatgtcccgcttgcaatgggcaactataacggcgatgtcccgcaattttataacggaaacggcggcggtgcgcagccgctcatcgaactgccgaaaagcacgaaataaggagcgccacatgcgcattgtagtgctccttatttccgctgcttctcaagcaattcccatctccttaagtacgggtaaggatcaaaagaccattcgttccggccgttgtctttgtatatgccgtagtgcaaatgcggcggaaattttccggatgtgccgggcgggccgtaaccggtgctgccgacgctgccgatcagcatgcccggtttgacgacctggccgacatgcaaatttttggcataaccgcttaaatgggcaaaataatgatatgaattgttcaaatcacggatgccgatgcgccagccgccgtacttgttccaccctttcaattcaatgaccccgtaacaagtcgcgcgtaccggaacgccgtaatcggcaaaaatatccgtcccttcgtggatgcggagtccgccccagccgcgccggtcgccccatgtgctccggtagctgtaattgtatccgggcgggatcgggaacgcctggtctgtcagctgaatggtgccgaatgtcttgtaaatcttcgccttttccgtaatcagctgcacggctttatcccgtttgtaataatgccacagcgcaatttcaaagccgtcgtcgtccgttccatactgcagcaaatagtcgctcatcgtaaaaagcacgtccagatcatggttgcggtcagctttcccatctccgttcccgtccttgccgatcccgccgaaaaacgcaatcgaaagcgggcgggtatcattgtggttcggattggaaagcccggaccacttttcagggggaaaataaatggaaataaggccggccggtttcggcaggtcggaacggacaaaccggatgctccgttcatactggtcaatggctgccaaattgtaccacggaatctgggtaaatgcctccatatgctgataaagttccatccgttttttgtacatttctttatcgggcatttcttttgcttgggcatgaatggcagaaaatgaaagccccgttacaaggcagaaaagcaaagcaaaccgcaatgtgaaaaccctctttctgtcaatgttgtcgatttggcaccgtacaaacagaaaatcgcaatatgaaaatcttcttatgcttattgtggaaagagcagcggattttcatcaatattaaatattggaaaaaccggtggcgttttcttttcaaagaagtgccgaatgtggtaaagtgagagagaacaaacccgggaaaatggtgggagagatggaaaatgaacaaacaggaagagattttacgcaaacccgaatggctgaaaatcaagcttaatacgaatgaaaattatacaggattaaaaaaattaatgcgtacggaaaacttacatactgtttgcgaagaagcgagatgcccgaatatccatgaatgctggggaacaaggcggactgcaactttcatgattctgggcgatacgtgcacacgcgcctgccgtttttgcgccgtaaaaacagggctgccgtccgaacttgactggcaggaaccggaacgggttgctgaatcggtgcaaaaaatgaacttgaagcatgtggttgtgacgatggtggcccgtgatgatttgaaagacggcggggcagcggtaatggctgaaacgatccgtgcgatccgccgcataaatccatttacgaccattgaagtgctgccttccgatttgcagggccggtacgaaagtttaaaaacattgatggatgcaaaaccggatattttaaaccataatatcgaaacggtccggaggctgacaagaagggtccgcgcccgcgccacgtacgacaggtcgcttgaatttttgcatcgggcaaaggaaatgcagccggagattccgacaaaatcaagcatcatggtcggcctcggcgaaacgatggaagaactggcggaagcaatggatgatctgcgcgccaataatgtggacatcgtgacgttcgggcagtatttgcagccgacgaaaaaacatatgaaagtggtcaaatattaccacccggatgaatttgccgaattaaaacgaatagcgcttgaaaagggattcagccactgcgaatccggcccgcttgtccgctcttcataccatgcggatgaacaggtaggtgccgctgcaaaagcaaagcatattttagggaacatggaacaaacgcaacaaatttgagaaacaggctgcgcacttgatgggcgcagtttttttcacggaaaattccgctcaatggagttgaaaaaatttttcgcgttccgcttagaatttgggcgttttttcgctataataaaattaggcaggaaggcacacggggaaaatggagggattgaacttggtcaccatccaccgccatacgtacgagattattgacaattaccggaatggctacaatgaagaagcattccgatgcagatatagtgaaatactggaaaagtacgactatattgtcggcgactggggttacggacagctgcggctgcgcggcttttttgatgaccgcaatccgaaatccacttttgacaccagaatcagtacactcacggaatatctttatgaatactgcaatttcggctgtgcctattttgtcgcaaagaaagtcgttgccaaataagtgttgcccggcaccgccagttgataaattttaggcagaaggtgacaggatgtattttgtggatcgtgaaaaaataaacgggatattgtcatttatggaaaagcggcttgccttgtttcaagcgcaaccggcctggcagaccgaaatcgaaaaggctgctttggaaagaattgcagaaacagtcatcgaatcggtccttgatgccggaaacgcgatcattgacgggtttattatgcgcgatccggggagctacgaagacatcattgacattttggaagatgaaaatgtggtttcagccgaatcggcaaagcagctgacggctgtcatcgcgctcaggaagcagcttgtccgggaatatacggatccggattacgccacttttcaggaagtgcttgcggctaacttcaaggcgctcgaacggtttccgaaagatgtgcgcacttacctggcaaacgaactcggcccggttaacgcttttaaaggggaataagcaacgaaacagagaggaatttcagcatgaaaaagtataaagcctatttgattgatttggacggcactatgtaccgcggaacggaaaaaatagaagaagccggcgattttgtcagccggttgcaggaaaaagggatcccgtatttatttgttacaaacaattcttcgaggacaccagcccaggttgccgaaaaactgcgcggattcgatataccggcaaaaacggagcaggtctttacgacatccatggcaaccgcccgctatatttatgaggaaaaaccggatgcttctgtatatgtgattggcgaagaaggcattaaaacggccatcaaagaaaaaggttttacggtcacatccgatcaccccgattatgtggtgctcggcatcgaccgggagattacttacgaaaagctagccctcggcgccattgcgatccgtaatggggcaaaatttgtttccacgaacgccgatattgcgcttccaactgaacgcgggctgctcccgggaaacggggctttaacctcggtgcttgcggttgcgacccaaaccaagccggtctttatcggcaaaccggaaccgatcattaccgagcaggcacttgaatatctaggttcgaaaaaagaagagacgatcatggttggggacaattacgatacggatattctggcgggcatccgcacgggcattgacaccctgctcgtccataccggcgtaacgacaaaggaaatgttgaaaacaaaagaagtccagccaacctatacggttgatacccttgaccagtgggaagtgtgacaagcgcggggcaaaaggaggagccatatgcccgcctcggcaaagtccgcgttatttggaaaacgaagaccgaaaaaacggcaagatacaataaaacgtatcttgccgttttttctgtttttacggctgcacacgcgccactctgtgtgcatggcggcttgcggctgcagcggcaatggccccgacgatatcatcgagaaacgtattgcatgagccgtcggaatggtcattaagctttgccaaaatgcccggtttttgtttgtcaatatacccgtagttggtaaagccgatcgaaccgtacacgttcacaatcgacaaagccataatttcatcaatgccgtaaagggactcatcgaccgcaatcgtgctttgcagcggttcgtcaagcatccctttttccgccagcacatccagctggatcccggttaaaatggcgttttgcacttcgcgtttggacagaacggcgttgacactttccatgcaatcctccagtgtcatttccggaaagtacttttcttgcaaatacaggacgagtttcgcaatatcttccacttctacgccccgttctttcaacctctgccttgcaatttgttctgacacatccatatttttcttgttttccatgttctcacctcaactattcgacattttctttagcatgatcattctaatggattttatgagatcaagcaagaatacacgttccttcacatataatgtagaaagtgcaatgtattttttgggggagggaagatgatggcacaggccattttgaaaaaatattacggcattgacgccgggcagcctttttttgacggaaaacgggtccactatgaagcaaacggtaatctttatacgctcgttcccgtgacaaatgttcctgaaaatgtgcttgttgaattatatgaaatgtctcggcacctcgtgacgaatggcgaccgctatgcctccgccttttatccatctaaagaaaagaagtttctcgtaacggacggggatagcgattatgttttactggaaaaccgctataaaaaagcgcccggaaatatgcgcacgggcaggaagcttgcgaaattccacctgcgcggccgcacgctttccgccaagataacggaaacaaaccggatgggcgaatggaaaaattactgggaaatgcgccttgaacaaatggaaaaggcatggtaccggacagtggaagagcaccccgaccgcccgtttgaacgcctgtttgccgaaacgtttccctattacatggggctttgtgaaaatgcgatccagtatgtcgtcgatacggaaatggatgaggcgcctgccccgggggatgccggtaccatttgccatgaacggttttcaaacgaaacatggggccggaaatttatcatccaccacccgtttgactgggtgtttgaccacgcaggcagggacattgccgagtggatccgcgcgcagtattttaagaaaacacacacgttccggcctgatgtccgcgcttttttgcagcaatatgtttcgctttcgccgctttcgcctttttcgtggcggctgattttcgcgcgcctgctgtttccccttcattattttgaatgtgtggaaacctattttctcacccggtctgaaaaggaacaaaacatgcatgaggaacagctttggaaaattgtacgggggatagaggcatacgaagcatttctgggtgaattttatgagctctcggaagtcccgataagaaaataccatattccccgggtggcatggctaaaagcccgataaaagaaaggacggcaagcacctgaaccgcaccgccggccatgcccgtccgtcgtgaaggcaagcggggatgccgggcatagtgtgaatggcctcggagaatcgcccacgccaagaatcattttatcccagcaaaaaagcggctccttgataggaaaccgcgtactgcccgttaaaaaacctgttcaacttccacaacgccgggaacctcttcaaacaatgcgcgttctatcccggctttcaacgtgatcgtggaactcgggcagctgccgcatgcccctaaaaggcggagtttgacaatgccgtcttccacgtcgatcagctcgcaatcgccgccatcacggagcaaaaacgggcgcaatttatccaatacttcctgaacttgttctgtaattgtatctgcaggcatatgatcgctcctttcttacctctcattatatacaggattacgagaaaaatctattataaaaaagggatagtatgtgtcaagtttttctcgacaaggtttaaatatcgggtattccaagacactctttttgtacactttcggctaccgtgcttcacttgctcggtgtaattttcggaaaagatgtgatatttccgtataaagatggacaacggggatgttgaggcgcgcgaaattcactcgctttccgcgggcggccggcgagcctcctcgctcgtacctcgctgcggggtctctcctggctcgcttttcccgcaggagtctcgtaaatttcgcgcgcctcaacgatcagtccccactgagccaagcttaaaacgaaagctctaatattctaatattttgcttaaatgtcccattgccgatgaactgcttgaatgcagggcaactgatccgtgctttacgcccactgacgggcgtacaggctgcttgagtnnnnnnnnnnnnnnnnnnnnnnnnnnnnnnnnnnnnnnnnnnnnnnnnnnnnnnnnnnnnnnnnnnnnnnnnnnnnnnnnnnnnnnnnnnnnnnnnnnnntaaaattttacacatacaaagggatatagtgttttcctttttgcaggctgttgtgtacaatatgaataagaaatccacggaagaggtgcgggtttgatggagaaaaaagtggcgattcaagtttacggggcggagcaaatatgcgcaagctgcgtcggcgcgccgtcttctaaagatacattcgaatggctaaaagcagcgctttcgcggaaatactcgggccagccgtttgacatgcagtatatcgatatttttgcacccggtgatgatccggaaatccgttcttttgcgcaaaaagtgctggatgaagatcttttttatccggttgttgtcattgaaggcgaactggtggcagaaggcaatccacggttaaagaaaatttatgcggccatggaacaacacgggtttatcccggaaaatacgcttgcagcaaatgagtgaaaaaaggggatggggaaattgatccgtttttatggcagtgtttttgcctggatgtttcccaatttttcactttttgccctaaagaatacgcaatcattgttttgcacggtgtaaatggttataatcaaggaaaggaggttcggatcatgagtgaagtgattcatcttacagaagcagctgcgtttcaaattaaagacatgatggagcaaaacgatgagcaggacgcatattttcgtgtgtctgtaaacggcgggggctgcagcggcctatcgtacggcctgtcgcttgaccacgaaatcaaagaaggcgatgctgtcggcgaacagcacggcatccggattctcgtcgaccatgagagcgccccgattttaaccggcacggtcatcgattataagcagtcgcttttagggggcggattcacgatcgataatccgaatgcgattgtcacctgcggctgcggctcctcatttaaaaccaaaacaaaagccggcacaccggaaaaatgctgaagcatttaacggctttccgaaagacgatggggtccaccttaaaaaagtataaagcaatatttatggaagaaagtgaaagtatgaaaggtttagccaacttcttaggtgggtttctgattgtctatcctgtactgatgtccttagtatggattatcggtgcagtgctctatttcttacttatagagcgaagactgaagcagacgccaccagagagggatgagtatgaagggatttcctttcttattccttgttacaacgaggcggatacggtagaagagacgttggtcaatgtcttgaagctctcttatccgaagaaagagattatcttgattaatgatgggagcagcgataatacagcagagaaaattaacgcgctcaaagatcattatgacttcagattcatcgatttacaacagaacagaggtaaggcgaatgcgctgaatacagtagtgaaacatgcgcagtatgatttcgtcatgggtatcgatgcagatacgattattgatgatgccgcgccttacttcatgatagacaactttagacatgcgccaaagctcggtgctgtaacaggcaacccgcgcatcagaaacaagtcgtctatcctaggcaagatccagacagttgaatatgcaagtatcatcgggagtatcaagcgtgcacagacgttgaatggctacgtcaatacgatttcaggtgtgttcacgctgttcagaaaatcagcccttgaagcggtagggtactgggatgatgatatgatcactgaagatattgcagtgtcctggaaattccatatgcatcactatgaaatccgttatgaaccccgtgcgttatgctggatgctcgttcctgagacgttcaccggcatatggaaacagcgtttgagatgggctcaagggggtcacgaggttgtcttgagagagtttaaatcgatgctcaagcaaccgaacctgccgttatggttattgtacctggaactgcttatttctatcatctgggtctactccatattattcctgctggcttttactatcatcaacatcgacgttctggattattacttctacgcctacaatgtcaatttgctgacccttgcgtctatcattctgacgacggtgaacgtcattcaatctacggtgtcgcttgtgatagatagcagatatgagcgcaagaacatcgtctatctgttcttcttatgctggtatccaaccttctattggttgattaatgcgtgtgttgcagtgtttgcctttcctaaagcactgcgccgtaagaaaggagagtttgcgacatggtcaagtccggacagaggcaacatccaacggtaaagtctactttgaacttcttcaatgagtgtgtgctctttatactgtcaggcacgttatggttatattgtctgatatcggtgttcatcctctttgctttattctcattgcaggactttgaagtggctcagttcttcagaatcatcttcaacctggagaagcgtgaactggtgcgtacgatgataggtcttttggcagcggttggtgtcatcaccgtctatctgctgagtacattcagtctgacgaaatggaggcagcgccgttatgaaacgatggattagtctgttgctaattgctctgctattgctgaatggacagctggtagaggcaaagggcagtgatgagtctaagcagtgtcttgcgctcaactatcatcgactgatcaaagacgatctgtttacgaatgtcatcagtctgctcacttcgagtaaagagctgaacttctattctattaaggatagtgagtttgaggcacagatggactggctgattgcacatgacgcgacttttgttacggaagagacgttgattcaggacaagcagcgcggtaagtttccggagcgctgtgtatgggtgaacttcgacgatatggatcagtcagtgctaaaactggcacatccgatcctcaaggaacgcggcattccggcgacaggtttcgtgattacgggtcatgtaggggatgactcgttccacaatcttaagttgatcgatctgaagggccttaaggagatggaagcatccggcatatggcagttcaattcacatacacatgacctgcataacttgaagcgttcgacgtcagatctagtgaagcactctagcaaggccgatgcggatatcgacaggagcgtcaagtatctcgatcagcactttaacaagaaggccacttctcttgcctatccatacggccagtatgacgatgcagtcatcgatacgctggagcactcggcaatccgtcatgcgtatgtgctgaaggatacaccgatccatgtcgatgatgataattacacgctgccacgtatcctggtgaccagagattcatttgagaaagtcgtaaaaaactggaaaggttttaaatgatatgaaaaaatatagactggaactgaactatgtaagggtgatcctgtgcgtgatgatcgtcgttacgcatgtcctggcggagtatacgaacgcccatagtaacaatgcagcacagcttgagacgctgtactggatcaggatgctgctcatcttcggaacgccggggtttctgatgctcacgcagcttatcttcaccctgaacctgcaaggcttaccggacaactacttgagacgccgtctgcagtatgtcttcatcccgtatatcgtgatgggagccttctacagctatagtgagactatatatctgcgtaaaccgtttatcacacagtttgtcgagaacgtattgaaaggacagtggtacggctactttattctgatcatcctgaagttcttcatcctgaacgtagtgatcatgaaactgtggccgaagctgctctcatcgcgtactgcagttgttatcgccatcctcatcaacatcgtctatctgtatgtctatcatcataacactgtggtgagcggctggatcgataatacgtatttctttaaggcaaatacggtgctgctcggctggatcggctattatttcgtcggttcatatcttggcagaaactatgagcgattgaaagcttactttgaagattacggattattctttatcggtatcactttacttgcgtttatcctgttcatcatgaccggggatcatgactttgctgatgtgacgagcaataacgaatatatcatgctgtattgtatcagtgcattcttctacatcatccacttcagtatcaaggttcaggggatgctgctggaagctgtgacgctcatcagtacgtattcgttctttatctacctgttccatccgatcatcctgcagtatgtgtatgcctacacagaacgctttgaagggagcacgctgctattcatgctgttctctgtgctgctgacgttcggcgtatgcatcggtgtcggtagtctgctgagaacgttcaacatcttcaagtatgtgatggggacacaaccttatagataacaaaaagactcaaacgttttaatattcttcctataaagtagggcttgctgaacgaatcaaatttggtcagatacaagccaaatttgattcgttcagcaagccctaagtatgacaagaattcaaaaacatggcttgtagatgatgcggaagatgccaaagcggacggatcagaaagcagtgcatgggacaacaaaaaagaactgaaacaaaaaaatgcccctgtcctgaaatgggtcagaagcggtgataagagcgatatttaatcaaaaatcccggttgggcagccatccgggattttgatttttccttattcaaacagcgaagtgctgtgcatcggctggacgcgggctttcgggtcaagatatgttttcgcgttgctgaccgcggtggtggcttccccgaaccccgttacaattaacttcactttgccttcaaacgtgcaaacatcgccggccgcataaacgcctgggatgtttgtttccattttggagttgacgacaatggaatttttttgaatctctaggccccagtttttaatcgggccaagtgacgaaataaagccgtaattgcaaataagggcatcaatatcaagcgtttctttcgcctcgccttttacttcttcaatcacaagccgggaaatgttttccccgtcgccaatcacttcgctcgcgacaaacggtgttttaatctccacgcgcgattgcttcaactgttccaccgtgcgttcatgggcacggaatttgtcacggcggtggatgagcgtcactttttcggcgaccggttccagcataagcgcccagtcgaccgcggaatcgccgccgccaaggatggcaacgcttttgccggcaaactggttcatatcatttacaaaataaaacagattgtttccttcgtattgtgcagcattttccacttcaaggcggcgcggctggaatgcgccgacaccggcagtgatgatgactgctctggaatggtggatttctttatcagttgtcagcgtaaaaatgccgtcttcactcttttcaagcttttctgcggactggcccgtgcagatcaccggctggaacatggaggcctgcgcttctaattgatgcacgagatcagctgccttcacttttggaaaaccggcgacatcgtatatatacttttcagggtaaagcgcagccagctgcccgccaagctgtggcaggctttcaatgatttttacagacattttccgcaatccggcgtaaaaagctgtaaacaagccggtcggcccgcccccgataacagttatatcataaatggtttgatcttccttcaacgaaacccctccaatacgcttcattctccttcatcatagcacattttggcacaagcgcacaggctaaaaacctctgcgggcaaggcaggcaggtgttcctccgtccggaaaaaattttaggcaccatgttatatattagaatatttttattattattttagtacagttttcaattgaaaatagcgggtaaaaagcatatgattgaagtggagatatgtattttttgtgacaatttgatggagatcatgtgacaaatttggcgtgccaattgtcgtgaataaaatcacaaataatggatgatgttgccatacaggcgccggcctgtccaaaaaaaagagatggaagtgagaaaaatggagaaaccgaaagtggttatactgggtgccggttacggcgggctcatgaccgtgacgcgtctgcaaaaacagcttgcaaaaggggaagcggacatcacactcgtgaacaaaaatgattaccattacgaaacaacatggcttcatgaagcttccgccggcacattgcaccatgaccgggtccgctacccgattcaaaacgtcttaaataagaataaagtgcaatttaaacaggcggaagtcaagcggataaacaaagacgcgaacatagtagttttaaaagacggggaagaattgccatatgactatctcgtcattgcgctcggttccaacgcggaaacattcggaatcgaaggtttgaaagagcatactttttcgattacagatgtaagcgctgcccaaaaaatccgggaacatattgagcgccagttcgatgcctaccggagggaaaacgataaagatgacaaccggctcaccattgtggtcgtcggtgcgggttttaccggcatcgagtttcttggcgagctggtgaaccggattccggcgctttgcaaggaatacggaattccacgcgataaagtgcggatcgtttcgattgaatccaatcctatcgttctcccgcaatttgaccgtgaacttgtcgattacgccctttcgtatttggaaagcaaaggcgtcgagttccatattggcacggcggtcaaaaaagcgacaaaagacggggtatgggcctgcaaaaaaggcggagagccgtacgaaatcaagtctggcaccgtcatctggtccgcgggtgtgcgcgggaatagcgtgattgatgcgtccgggtttgaaacggtgcgcggccgggtgaaagtcaaaccggatttgaccgttccggggtatgaaaatgtttttgtaattggggactgtgcgctgatcatcaataaggacacaaaccgcccgtacccgccgacagcgcagatggcgatgcagcatggggaagtatgcgcacggaacctcctgaaaaagatccacggtgaagaaagcctggaagctttcacttttaatgacaaaggcaccgtctgctccctcggggaagacaatgcgatcggcattgtgtttggcaaaaagctgaaaggcacttctgcttctgttatgaaaaaagtcgtggatgaccgtgccctgtttatgatcggcggcacgaggcttgttttaaagaaaggaaaatttaattttatatagcaaaaatattatcgcgttacttttgacgaaattcagttttttcagtaaactggatgtacaacggggatgcggaggggctcatgagtataccggtattgattatttcgatggtcctttttcttgttttgtttttcggtatcggttttattgccaatatgcttttgcggatgacctggattctctgttttatttacccggtcattgcgctttcgatgattgaccggatcgctttttcccggtattttaccgatcctgggacggctttccggcaacttggggagcatcttagctccatccatttatctgatgccctcgtgttatcgagcggccttgcgggggcacttttggctggtgttgcgataaaagcgctccggaaaaacggataccggatgttttaaaactgccttgagggcagcttttttttgcctttaaatcggaggcgggccggccggcaaaagccggcgcaaattttccggataaaacaaccagtgctttttggaagcgccatttgcagaacaggagaatgggcggcgcgaaaaagggcagacggatcagctgtttttttgccaatatgcccgcatattttggaacggcgtgggagacaatagccctaagaggagtgagaccaattgaacatgaaaaaatggatgatccgcttattgatggccattttgttcatatgggcaatgatttccactttccaggccatttcggggataaaagcagcagctgcaaaagcggcacctgcccgggcattggaaaaaggattggccgccattgccgcgagccagccgcagccatcccttgatgcctatgactggagcaattacccgaaaaagaaagtgacagcaacggggtatacggcaggggccgaatcgaccgggaaaagtcccgaccatcccggctacggcatcacctattccggggtgaaagtgaaacgggatttatattcaacgattgccgctgatacatccatttttccaatcgggacggtcctttatatcccgggctatgatttcggtgttgttgccgatacaggatctgccataaaagggaaccggctcgatctgtattttgaaacggtttcggatgtttacaagaaatggggaaaacagacgcttgatgtgtatattattaaaatgggggacgggtccctgacggaaaaagaactggctgaactgaacgaaaacaaaacgatgcaagtgttccggcagcaatatatcaagccggaaacgaaagaatagcgcaaaatcgccggttgcgctttttttgtgcgtttttttcaagctggcggctataatggaacagaggtggttgtatgtttgaactggggaaaggagatccgcttgaatgccttgaagactgccttgtgattggcttgcagcaagttcctaaaaagtttggcggcttgcttggcggcctggacaaccgtttcggcggggcattgacggaactggtaaaatccggcgacctgtccgcacgcgccggcagcctttctgtcattcacaccctcgggaaactgccagtaaaacggcttttgtttatcgggcttggcaacccgaaagaacttagaaaagaacatttgaaaaggatgtttggaaaagcagtgaaacacatccggaaaatgagatggcctacggcagcggttttcctcgatacgttttgcgccggcacagtcagcgtgaaggaagccgcgcaaatgcttggcgaagccgttccgatggccacataccggtttgccggttacaaagggcaaccaaatattccggaagtgcagctcgaaaaagtagcggtttacatccaggctgccgggaaaaaaccggaaccggcggaacacgccacgccggtccattccagtgtcgccgaggaagcagagatccggccggggaatgccgagcatgttaatgccgccgggaaaacagagggccaaccggttaaaaacgccaatcttcaaacggatacataccgtaaaaataacggttcccccgaagaaacaacaggcgctgccctgcaccgcgggtacgtgtatggcaaagccgtgaatacggcacggacgtttgccaatatgccggtgaatatatggacgccggcccgtctcgcggaatatgccgcatcacttgcaaaaaaatacccttttgaagtggaaatccttgaaaaaaaggagatggagaagcttggaatgggtgcggttttggctgcggcgggggaatccaaagagccgccgatcctggtcatcctgaaatacgcgggcaaacgggaatggggcaatgtgctcgcacttgtcggacccggtgccgcagccgattgttgcacaccaggtgagaacaccggcatggcaggggcggcagctgttctgggcgccatggaagtgatcggggaacaaaagccggcccgaaacgtcgtggcggtgattcctgtggccggcaatcgcatcaccggcactgcaaccaatgggcaggacaacatgcgcactgaaacggctgtgatcacaagcatgaacggtaaaacgattgaaatgcgggataccggtgctgccggtttgctgatgctcgcggatgccgtaacgtatgcgaagcaatatggtgcaagtcaaattgtagatgttgcaaccttgactgcggacgtgatcccggcgctcggccgcgataaaacgggcgctgtcgccaattgcgatgttttttttgaacgggtgctggaatccgcaaaagaagcaggagaattcatctggcgcctcccggtaacggaagcggacaaagaaaacgcacgaagcagcaagatcgccgacttgaacggttcaccaggcagagagggcggcgtgatggtgaacggggcttttatcggggaatttgtggaagataccccgtgggcccatctggagattacaggaaccgccataacagggaaagaaaccgatcttggcccggccggtgcaaccggcgtaatggtacggacactggccttgctggctgagaagatggcagaacaggattaaaggggggcgcgctactccaagcgaaatgaatgtgctgaaaggcgtgcgccccacgaccgcagttttaatgaagcgctgtaacgaaggaccgccctccggctgcctgcagatacacgcgaatgaagacgaaacggcaaatggtgcaggccggatcttgcccggccttccgctaaaaagctgaaattaaaaataaggcaaaaaagagcactacgctcttctttgccttatttttgtgtccgtcctttctgtttcaacacctcgattgctattttaaaaataagcaccatgatgcatatcaggagtacgcctttttcgacaccataaaaggtatcgaggatgccgatcggatgatggacagatcccataaagtcccttgtcatataaaaatcgattccggcaatgaaggcatagaggaccagtgcggcaatgccggttaaaaaaacgattttcatgcgtgccaattcctttcatatttttttcgaatcgaaacatactaacaacaagatatcttcatcagtagtttgcgctccgttacaaacagccatgcacgggcgaaaaggaggatcggtatgccatattggtggaaaaagcagagaaacgctgcaaaaactgataacaaaaatgaaaagaaaagcgggggcgtgcagaaaacacctgtgcgcggagacgatacgagcgggactgtaacggatatcccatttttgaccatgggcaccgatttaaaaacgcgcctcgggcagttgaaaaaaacaaccgggaacagttccgacattgtcatccatcaaatcatgcttggaagcggcaatgattttccgggtgccgttatatctgtcgatggcctagatgatccgaaaatgatcaatgaaaacctgcttgaagtcttgatgggcaatccggaaatcgacaaatatttgaacagtgaaaatatgctcgacagcattatgaagcatgtgattaaaattggcggcgtgaaaaaggtcatgaattggaatgacttgtttgaagaactgttgagcggccagaccatcttactgattgacgggatatacggcggattaagcatcagtacaagtggcgggaaacagcgggcgattgaggagccttcaaccgaagtgacggttcgcgggccgcgtgatggttttaccgaatcgctgcgtgtgaacacctcattgatccgcaaacggattaaagatccgaatctgtggatggagaactttaaaatcggggaagtgacccaaaccgatgttgcacttatgtacataaaagggatcgtaaacgataaagtgcttgaggaagcccgtaaacggttaaacatgattaaaatcgatgccattctggactcgggccatattgaacagcttattgaagataaaacgtataccattttcccgacggtgtaccattcggaaaggccggatgtggtggcggccaatttattggaaggccgtttcgccattattgtggacggttcgccgttcgttttgctcgcgcctgctgtttttatccaatttttccagtcggcggatgactattatacacggtttgatattgcgacagcgcttcgctttttgcgcgtgctcagctacttaatctcgcttgtcgggcctgctgtctatgtcgccataactacttttcatcaggagctcctcccgacccagcttgtttttactctttcggcacagcgggagacgattccttttccggctgttgtcgaagcgatggggatggaggttgtatttgaaatcctccgggaagccggactccgcctgccgcgcccgatcggccagacggtgtcgattgtcggggcgcttgtcatcggtcagtcggcagtgcaggccgggattatttcgcccgcaatggtcattgtcgtctcgattacggctattgccagttttgccaccccgtcttttttcattgccatttcagccagattataccgttttgtttttatgtttctggcggccactttcggtttttttggcatcattatcgggatgattacgcttgctgtccatttgaccagcttgcggtcattcggtgtgccctacatggcgccgattgcccctttcatccgttccaacttcggtgatacggtgatccgggtgccgatttggtcgatgagcgccaggccgcggctcttcagccagaaaaatatcatccgccaggccgaaaaccaaaagccgatgccgccgaaacaaaaaagtgtgaaaaatggggagcaaccatgagaagaagacgatggaaaacggccgttgccctttttatgacatcttttttgctggcaggctgctggagccataaagaattaacggatattgcttttgtaagcgccatcggcattgaccggcttgaaaacgggaattatttgctgacctatcaaattgtcaattccttaaatattccaagcggcatgcaaacaagcggcgagcagggccccactgtcaccatctaccaaacggaaggcaaaacggttgaggacgcatttctcgctgcaggccgggaaatttcgaggaggttatatttttctcatacaaacgttctcctgattggcaaaagcacggcggaaaatgggatttatccgattattgatatttttgacagaaataaagaattccgcaatactgcttccgttctgattgcccgcaacggcaaggcagaggatgtccttaaagtgctgactccgattgacaatattcctaccaataaaatcaataaaacattggaatatgcgcaagaagatgtcggcgggcgggtaaaaacagatatttcagatctcctatatgatcttacaacggaaggaaaagaagcagtagtaggaagcttcaagctgataggggataagaaaaaaggagagatgcaggaaagccagaatcagacagaactggacgcatacttaacgagcggggggatcgggatcctaaagcatggaaaactgattgactgggtaggcggacaggatgcgcttacgattacatggctattgaaaaaaacaaaaatgacttcgcttgatttagactgggcgcatcatccaaatgcgctcgggctgcaggtaagaaaaacgattatcggtatgaaaccggccatgaaaaacggaaagccggaaatgcatatccacatcagccttgtgggccagctgcaagaaatcaatgtaccgcttgatgtaatggattcaaaggaaatggcccggattgaaaaagcatacgaaaaaaatgtggagcagcaaattaaccatggcattcgccatatgcagcacgaccaatgtgatgtgttcggcttcggggaaatgatttaccgccagtacccgaaagagtggcacagtttaaggcaccattggaatgaaaagggctttgcccatttaaatgtgaaggtgcatgcaaacgtcgtcatcgccaattctggaatacggacaaatccattccattcaaatttaaaataacagggcctggtgatatatggaaaaggcaaaaatttcctcgtaccaattatttgtgttaatctttatgtttgaacttggcagtgcccttttgctgggaatcggaagcggcgcaaaacaggatgcatggcttgcaattttaagcggcctgagcgtcgggtttttcctgttttacgtttattacaaaatattttccttttatcctggcatttcgccggtcgaatggttgcgggcgatttacggaaaaggtattggctggtttttcggctttgcgatgggcatttacttcctgtacctttctgccagggtgctgcgcgactttggagaaatgctgatcatatcggcttatccggaaacaccgctgtttattatcacgatgattttggctttgtgcgtcatgtatgcagtaaaaaaaggaatggaagtgatggccagaaccggggagatcttttttatcttcttttatttgctggcgattgcgagtttcgtattgattacttcatcagggctcgtcaagctcaattatttgaaaccagtactggaaaacgggcccatgcctgtcctaaaaacaatggggaaggagacgatttatattccttttggcgaaacgattgcgtttttgtccatttttccgcttgtagataagataaaaagtgtaaaagtagccgggctgtcagctatgtggctaagcggcacaaatttggcgatctcgatgctgatcaatatttgtgtgcttggcgtggatgccatgatgcgatccccgtttccgctgcttacgaccattcaggaaattcaacttgcccattttctggagcggctggatgtactttttatggtggctttaattgttggcggatttttcaaagtggggatttacttatatgcggcttgtattatgtttacggagctgttccatgtaagcagctataggaaaacggtctatccgctcggcctgattatgttgtgcgcatcggcaatgattgcctcaacatatgcggaacatatcgatgagggcatcaaagtggtgcctgttctgcttcacctccctatacaagtggtttttccggttgtaacgctcctgctgattttatggaaagagcggcgcaaaaaaaagaacaggcaaaagccagcgtctgcgtaacgcccagtccggtacgggcgggatgcatacactaaaaatagaaggagaggaggttatttgatgtatccgcatgcacattacccggcacgttcaccattttttgtcggaccgcttttgggcggttttctcggcggcttgcttggcggcgcactggtaaggccgcgaccgtatttcccatatcctccggtgccatatcctccggtgccatacccgccggttccgtacggaggatatccgccattcccgtattattaaaaaataacccccgcttttaagcgggggttattttttcgggcggcaggatcccggggcaatggacaagccgcaagttatgaccagcacattttcaaccggagctcgcagcaaggtgcctggttgcccgcggcctggcagacaaactgcaatacaaggccgtccggtgtataaaaaacacgcggaatatgctggataccggttcccgccagcatgcggccgacaccagctgaatctgatttttgtgcggcagacatgagttgtccggcaaaagccgcagagcgggaaatccggttaagcaaaagctgtgcatctgccaagagttcgtgcgtgtgtatggccgaatccataaattttttcgggtggacggcaggatattggcggtaaggcatggaatagtatggaaaggaaggaacaacataatacggattgtagtacaatattctcaccttctttctcaggtgggaaacatcattttttacatagtatgaaagaaaggcttgaaagatgtatggacaatccggaccggggggaaagagatggaactggaacatacaatgatcggcgcgcttggcataaaacttgtccaaatggagcccgggaaagtggtggcgaccatgccggtgaatgaaaaaacgatacagccgctcggatacctgcacggcggcgcatccgtcgcactcgcggaaaccgctgcaagcctaggggctgcgatgctgatcgatttagaaaaagaagtctgcttcgggcttgaaatcaatgccaaccatatccgttcaaaacggaacggcaccgtaaccgcagttgccgaagccgtgcaccggggcaaaagtacccaggtttgggagatcaaaatcaaagacgaagacgaaaacttaatttgcctgtcgcgctgtacgattgcggtcgtaccgaaaaaaagctaaaagtttcacggcccggcaagaaaaagtaaaaacggcaagataccaccaaactggtatcttgccgttttagctttcccggacggtgcggcgctgttctgattttacactgtaaagaaggagcgcaaatgcgaacaggaacaaaactccggttacataaaacacagatgaaatgccggagatgacggatacgtaaccgccaatcagcggccctgttacattcccgagaaaccggaaactttggttataaccgagcacttcgccttgcatgctgagcggcgcttcgaggcggataaacgccacaatgctcgggttcatcccgccgatcaccatgccgaacaaaaaccgcaaaataatcagttgccataaatggcttacgagagcttgcggcaccatgaaggcgcaggcaagcacaagcaaaatcaaaagaatccttgcatgcccgtatttatcgccaagcatgccccactgccttgccaaaagcaggttgccgaagccggtggcggaaaaagcaagccccgataaaaatgcaatattgcctgaacttgtcaaatggctgacatacagtgccaaaagcggctgaacacaaaagttcgccatttggatcaagagtgcaatcaccataacagtaatcaaaatccggcggctgacaatttgtttcacaacagcgaggggagaaacaggtttcccttttcgccgggcaggatcggcacgtttttctttaatgccgaaaacaacgccaagcgcggcaatcgaaatggcaacggctgtaatcataaaagtgtatttaaaaccaaaattgtccgcaatcgatccgccaatcagcggcccgaataagtttccggaaacattgcccatttgcaaagtgccgagcaccttgccggcttcctccttcgaggtctgcttggaaatgagcgccatggaagtcgggataaacccggtcacgatccccatgaaaatccgggtcagaaataaagtggcgacattgtccgcaagccccataaacaacaggctcgcggcaatgccgaacccggtaataataagcgtcggtttaaagccgtatttgtcgccgatgcgcccccagattggcgacataaaaaaagcaaccagaaaggtcacgccaaaaatatatccggcccagcgctggacatagctgtcgctgaagtggccgaatgtttgaatatataacgataaaaacggaacgaccatcgttaagctggcacctactaaaaagttacagacgaacataatatacaaattgcgtttttcctggctcatcagatgagaaaatcgcctccttgcgcaataaaaaaagataaaagtatatagagtaaatatttcgttgacctaaatattattataaaacttatcaccgaaacttcaacaaaaccggcttgtaaaaaaggtgtccgttttttgacggaggaactttacccttgcatcgtatgcttgaaacgcacttttgtataggacggcccgcacatctagtatatgtttgaaatccgaaccccattttggaaaagtttggatcccgcccgttttgccacaaacagttccggccgggccatgtacgcgcaatttatcaagtaaaacggcagagaaatgttggatcgtgtttgaaagggaatgatgaaggaggatatcctatcattttcaaagtaaacgaatacaaaggcatccggctgatttaagcctggtatatcagaacatggaaggcaaaatccggatccacggatttgggcatcggcatttggcactggatatttacacgcggcttacaggaaggaagtaaaaagaagcattccccgattccctttttgccgcagaaaaaaggggatatcacgttttccctaacagtatcattgcccctgccatcagaaaacccgctgggaaaatcatccaacgggtgatatgccatattctttcatcaaactttttaacgcggcgatgcttttccggctgtaaagtgtgtcctctttttcaagcttttccatcagttcgcagacagcggttttcagtgacgcgtcataatccggaatctcgccgttgtacggttttgccgtttttcgcttgtgttacccatatcaggacacatcccttcgttaatattatatttcactaaagggtgtccatgaaactatactagcatcacaatttttaaattgatagaaggctaatcatagacaattatagcttttgattagcctaaaaccatttatttccctgaaactctcaaaagaaattcactgacatcattctctggtccttcaaagcgaacatccgtatcaattgcttcaaaatgcttgcgggcaaactcgatttttgccagctcagtcgggcgtaagaattcttcaatatccgttcctttcgtttccaatacgaaatacaatttttcttctccatctttgttgatgacggcagcccagtccggattatagctgccaattggtgtgtcgattttaaaccaatccggcaattttacatacactttaacatgttcatcagattcaaaccgttttgcaaatcttgcttcaatatccgagtcataaatgacatggtcatatggggatttcgtactttcaactgcgttatcatttaaataagccagcagttcttcgttttgaaaaagctctactgcatagtagtcatcatccatcttgtaatatttaattccgtcacgaaggatcagcttcatctctttttggatgattttcgtgatctcctcaataaacttttgtgggttgttttgaaaatctcccagtcgtttgcacccagtcaatatccgtactattgtttttcgtgttaagtttgtacggttttgcagttccgtaatgacatccggcaggggctgctgtactgtgacataattttcaaatccctctccgacaaccaccgtttgcaaaccggtcaccctatctatggatgaaatggcgtcttttcgactaatgatccggattttatcaatttttttcattttttgtatgcttctgattgaattttgaatcaattctttgctatcaaaatcaatagaataaacggttttgtatttgattttatcccacagttcaagaaatgcttcgctgttgataacctctttatttaattttacatgtttcttattgcttgcatcccgtatcggcaaactttcggttatgcgttttaattcttttaaaatcaccggctgccaaggtttgaatgcttccgggatattgatttgataattggcaagctcttcttttaatgtggatgttgctttgtctttgtcattgatgtaatcatgggattttaaatatgcataaagctcctcggatcgttcgtaacctaaaggtaccggttcctctgtttctgcctcttcatacactaggcctgcaaaagcgtgtttttcaattttcccaaatgttacagatgtttcttcttccaattcagactgcaacttcgcaacaaattcttcataagattcattggccataaccgttaatgtgttcacattgtaatcggaaacccgctcgccattttggttaaccgccaggcgaaggccgcggccaatctcctgtcttctacttacatatgtgccgcccgaatctttcagtgtacaaatttgaaagacgtttggattgtcccagccttcccgtaaagcagagtgggagaatatgaagcgaagcggttcatcaaagctaagcaagcgttctttatccttcatgatcagactgtatacatccgtatctgcctgcgtattcccttttgtatcttttaattttccttttttatcctgagcaaagtagccgttatggatttttttcacgtcgatatctacatcaatgtcattaaacaacgcgcggtattttggcttctgaattaatttccgatattcttcttcaaacatgaccgcatacttgccttttaccggattcccatctttgtcgtagtcccgataattggccactttatcgatgaaaaacagacttaataccttaatgccccgaggattcaaacgcagttctttatccaaatgttcttcgatcgttttatgaatttgatatcgtttgatcgtgtcatcatcgatttcgccaagggcttcaccaattttcaaaatattcccgtttacttctattgattcgttaccttctgcccaatcgatctgctcaatacggtagttccggtagatatcccgcttaccggaaatatcatacagatcatccccatacttcaccgtttttgctgtacgctttacttttccgttcttattcacatctaattcgactttggctttgcgttctcttacttcaagcaatttaatgtacggtacattaaaagacggttccgaacgaatcgacattacttcaatttttttaacgagtttttcattatacgcatcgacagcatcgagacgataaatcatattatatttatctacatgtgttgccgaatagcgcaaggtgcacataggttgcagcgattcaatggcctcttttgatttcggtgtcgtgtctacactttgcggctcatcaatgattacaatcgggtttgtctgttgaataaattcaattgggcgatagccattcaggcggtcattaggacgatgaataacattggctttatcttctttttttggatcctcaaaacttttgcggaatgcatcgatgttaatgatcatcacctgaatcgcagttgccgtggcgaaactgcgtacgcggtcaagtttttccgagtcgtaaataaaatattcaagtggctgtcggtcatacagttcatgaaaatgctgttccgtcatttgcagagatttataaacgccctcacggatggcaaccgatggaacgacaaccacaaattttgtaaacccatattttttgtttaactcataaatggttcgtaaataaacatatgttttacccgtccctgtttccatttcaattgtaaaattcattccatctaaagtttcactctttggaaggccgtttctcatttgcacttgctgaacattttttaaaacttcatcagctgttaagtcaagccggttgccaattcctaaatccgtttgaatcatgccggcatcttcaccataaaagacggtaaaattagactgacggaccggctggccattaaaaatttggacaacagaatcaatcgcacgaagttggtaagcaaggtcggattgaaattgaagcttcatcctttacacactccttacgtccgtgatcccgtttttctttaatgtctgaatggcatttgttttgacagagtcattcagaaaaccggtttctttgaaaatcacttttgaatcaaaatcttccggcttgagttcgatgattttataaaccagatctaaatcaatttcattttccaggcataacaggactgaaccaaacccgacattataaattgttttttcattcacttttacttcttcaatcggtatagtaagcggaatcccgatctttaataaaatttcatacagtaaatcttcctgggtccggtcgaatttaatgttatcttgaagttcaaacagatcctgctcaagatttgccgtctcaggatcccatgttttcacgtttgaggaatcgagtttaaatactttgaaaccaatgtctaaatcagtcttccctgtttcttctactattttatccccggcacgacggatacgttctttgccaatttcgcatatatttttgtaacccgctttataagcttccgatttttcatcagttaattcaggaagctggaccatgataaatttgcgcctaccgttatctttcaggttaaaatccatcagcgcgtgggccgtggaggctgacccggagaaaaagtccagaacaatgccgtttttgtcgttttccaaacctgctaaagtaaagagatgctgtaaaaatttaatcggttttttgccgttgcggaacggcacatccccctcatagccgacgttattaaaagtgtccaccatatcaataaaattggcatacggcacttcaatgaaatctgctttatccagcgggacgccctgaaaataaacaccgttcgtgattttttcggatagtgggcgcataaaataccggtaaggatagcggtcattgcccatatccggaactttgtacagccagccataatgatccggtatgccgtctaaatacttcatataaaaccgcccgctgctgtttccttcttttaacgagccgcggatgctgattctttttaagttttttttcgatgcgggcagtttctctaatcgatattgggcaggcgtaaagacctccacttttttattacccatctcgatcacttcagccggaggttccagctctgtaatggaataaacatattcttcaatagaagaattgtcttttttctttttgaattgtttataactgctacttttcctgtagattaaacaatactcaaccacttcatggaagtctttatcgccttttaggatccggtcttcatgccgttgtttaatggaaagggccgttaaaaaattgtcttcgccgaacacttcattcagcagtgatttgaggtttgcaaattcattttcgtcaatgcttacaaaaattgccccgttttccgccaataaatttctcgccagttttaaccgtggatacatcatatttaaccagtctgtatgatatctgccatttgattcagtattggactttgtaacttgctcagtcacttctttataatttttaatactatccctaaaatcatctttatacacaaagtcatttcccgtattatagggtggatcaatatagatcattttcactttcccaaaatatgacttctgtaaaagctttaatacctctaagttatccccctcaatataaagattttttgtcgtatcccagtttttgctagatgctttatcaggacgtagtgtgcctgtcgaaggagtttgggcgagttttaatgcctgtgcttttccgtgccaagtaaactcgtatttttctttcgccgtttcaatttcttctccaagaataagttttaatttatcaaaatcaatctttccttctgttacgacttcgggaaaaagctgttttaatttcttgatgttttcttgcgtgatatccagagactttccatcaagtttctccattttttctttcacctactttgttaattctctttttaatttcgttaattgctgtttcagtttctgaatgtgaatatttaattttacttttttgttaaattgcgtttctttttttattttgcttttcagcgtatggattttttcatccagtttttcgatttcttgagagcccttgccaaaatgctatatcccctgaaactgtaagcagtcagacaattaaaggtcgttgatttattccactaaagaaaaaagacgtttgtaggaacattannnnnnnnnnnnnnnnnnnnnnnnnnnnnnnnnnnnnnnnnnnnnnnnnnnnnnnnnnnnnnnnnnnnnnnnnnnnnnnnnnnnnnnnnnnnnnnnnnnnaaacagaagacagtatcaaaggggcagcgtagtgctcttcacaattttacaagcatccgctttacatggagtggcggggcgtggtaggcttgtttgccatgcgaaagaaatcattgcccctttcgcccttcgcataacaccacgcccgcagaggctccatgtcaagcgaccagcgatgtcatgaaaaatatggcatgagatcaaaattaaatttcacttattggtgtccaaaatattgacttaaatccaccaactaccgcccgggggattgaaaaaatcaaccggtacggcactcccatctgtatcagtggacataaaatggaacttagaggatctgatcgggaaaaggggcaatatatttacacttgtcctgtatttcatccaaatgccaagcaagaaggtctcacctgcccgctagcgaatcacgcggaatgttgtaatggggcagcacaaggaagagtatttaggatagactttgatcaaacgcctcaagtagatgtcgagttgcctcaacatggtcgcacatttgaagtgttatatagtgccaggacgatcatcgaaagaatctttggcattttaaaagacggatacagtctccgtcgtgttcacaagcgtgggaaacaggcagttgaagctcatgtagatcgatgcatgatatctatgcacatcatggcaaatatggcgtaccatcagacaggaaaggccaattgtggatggacacgcaatcggctgcaaagagcaaattaagttattcacaggtggatatgtgaataaataaaatgagcgtttcctttccacaaagggtagtgaaaaaaacccattttgtgaaggcgggatacgtatgccctttttttgaaggaaaatgaccgttttacttctattgaattgaaaatctggatgaaaaggcaaaaaaaccgggataattaattttccagagcctcgctcaagggtatatttttattttggcagaggctctgaattttttccttgtgcttcgcctgcttttcatcattttttatcaattgaaaccggccaattagattggcatattgaaaagcttcaactgctcggtccagatctttatatgcttcataaaaattagagaaattgatattgatcaaatgaatagattggataaaatctgattcaaaatcgttttctgcttccggatcaaaccatggcgttttgtgaatccccaatagaactgttttcgtcttgtcggtcttattaagcctcttcatagacgagctgataacgattctatcatccattatggtgaaaaagccgaaaagaagcaaaagaaaacgtttggactttttgcccggattttagtaaagtagacaagaatagtgaaacaaatggaggtttcaaacatatggcagaagacacaatgtatccgcagcttcaagcggaagtgcatgaaaacgaaacggttgcagacatgcagacaaatatgggcaccatcacgatcaagctgtttccggcctttgcgccgaaaacggtcgaaaattttgtcacgcacagcaaaaacggttattatgacggcttgacgttccaccgtgtgatcgacgggttcatgatccagggcggggacccgagcggaaacgggaccggcggcgaaagcatctacggcgccccgttcgaagacgaattttcagagcggcttttcaatttccgcggggctttgtccatggccaacgccggcccgaacacaaacggcagccagtttttcatcgtccaaagcaaaacggtcgatcccagcatgaaagggcagatggaacaggcgggttacccggctgaagtcgtggaagcttatatggaaaaaggcgggaccccgtggcttgatttccgccacaccgtatttggccaggtcattgaaggcatggaggttgtcgatgaaatcgccggcgtccggacaggcctgcaggataaaccggtgcatgatgtcatcattgaaaaaatcaccatccgttaatcatggttctatgccggccttccctgcggctcttttcggaaacctgaccatcagcaccgcatgaaaaatgcggtgctgtatccgttttctttgtggctttcggctgttatgatcgattaaaagggggagataccattgtttccatacctcatcggatttctggttcaatttccgcaggagaaaaagtattatatcccggctttgatttcactttcattttttgtgctgcttgcggtactcgtgtttttcattttccggaaaatcaatgaaaagcaggtaaagcaggcaaaaaaactggaagaagaaatcatgaagaaaaatcgctttccacattcggagtagcgtttctttttttataggcggcagatgcccggcgtttccggtaaaaaggcaggaaagggtgtcatgttgcttccccgatgagttgtgaacgttggatgaaatgaaataaatggcttgtataaccgggcggattcatatatcttatatgtaaatgatgtaatctttttgtaacataaactactttattggggtgatcggccataaccaggaagaaaggtcttctcattggcatcattgcggcagttgtcatcattcttttaggcggtgccggctattaccaggctacccattttaacccgcatgtcaaaatcaacagcgtcaaagtcggcggcatgaccactgaacaggcgatggaaaaattaaagtctatgacattaacaaataaagtttatgtcggaaacaaagttttggtggacggaaaagatacaaaggtccgttttacagacggcgatatggcgaaggttaaacgcgttttcaaaacccagcgcacatggattccgtcttttaaagagaaagattatatgatcatgccggggcggacggaccaccaccgcaatgtgacactgaagcaggaagtttccaaaaaactggaacagcaaaataaaaatctgcaggcgccaaaagatgcacaggcttatatgaaggacggaaaaatcggcgtatcgaaaagcaaaaacggcaatcaatacgacatttccgccatgttaaaggcatatgacaagcaaaaatacaacagtgaaattcatttgcgcccggtgaaacttcagccggtccgggaaaacagcaggattgtaaagcaggaaaagcaaaagcttgaagaactctcaaacaagacggtcaactatctcctgcaggaaaagaaatacccgttcaaggcaagtgaactggttcaaaatgcatccgtctccaaagatatgaaactggcaattgacccgtccggcatccagtcgcggctggaagagttgaacaaggagaaatcgacgctccataaaaacttcagtttcaaaacgcatgcgggctccgtcatttccgtaaaaggccagtcgtatggctgggcgatcgatacgaaagcggaagcgaaacggattgcggacgccttccaaaacggcaaggacaccgtcaaggcctacaatatttacggcgaagggtacagcacgatcggcgtcggctaccatgtcctggccaaaaacgggattggcgatacgtatgcggaagtgtcgatttccgaccagcgcatctggatttataaggatggcaagctgaaagtcacaacccgggttgtaacgggaaggcatgacacaaatgaagatacgccaaaaggggtctggtatatcgaatacaaagagtccccgtctgtactggagggcagtgaagcgggcaacccgaattattccgtcaaggtaaaatattgggcacctttcacgctcggcggtgtcggtttccatgatgcgggctggcggaagaactgggccatggacgcctatctccaccacggctccggcggatgtgtgaacacgccgccaagtgtcatgaaaaccgtctatgacaacctggaacagaatgaaccggtcatcgtttattaatggccgagacggcttctatacgggccggttactgttttagataaaggggctgtccctaaagcccctttatttggatcataaaattcatgaagctcttgtgggcatagtgacggaaattcataaacgcttgtatcaaaaaagggggctcccatcagccgtttaacggttttggggcagccccttttttacatgggtttaaaattcttcataggttgccggatcctgcccaaaagtcctgccgtccgggcggcttaatccggatatggcgcgcatctcttcttcagaaagcgaaaaatcaaagatggacaggttttccagctgcctttccggggaagccgatttcgggagcggaatggcgccaagctgtgtatgccagcgcaaaatcacttgcggaacggatttctgatgggccgcagcaattttttgaatcgccggatcttcaagcagatggttcgctcttccaagcgggctccatgattccgttacaattccgtgttcttcatgccaggcgcgctgctcctcctgtgcgaaataagggtgaagttccacctggtttatgctcggcgcaaccccggtttcttttatgatcctttgcaaatgctccggcaaaaagttggaaacgccgatcgagcggacaagcccccatttttgcgcatcgacaagcgcctgccacgcttccacatataaatctttgcttgggttcggccagtggatgaggtaaaggtcaaagtaatcgaggccggacctgtacaatgattcctgaatggtctggaccgcttctttataagcatggtgccgccccgggagttttgaagtgatgcgcagctgttcacgcggaacggaagagcgccggaccgcttcgccgaccgctccttcgttttcataattaaatgccgaatcaatcaggcggtaacccgcatcaatggcgcttacgatcgcctggacgcctgccgccccgttcagtttgtatgtgccgaatccgacggccggaacggtcatcccgtcgttcagtttgatttcaggaatggaaatggacaatttctatcgctcctttcgtattttgtaatcagtataccattggctggaaaatgcatccattttgatgattgatcttgctgccttggggcagagaaaaaccagcgtaaaatttaaaccagcgggttcaggcgaaaagatccaaaacaacaggcacagccccccgcgaaacggcgggcatgaacctcccatggtggcttcgcattcgctggaaaaaaagcagccggcatgaaaagtacagcaaaaccaaaggggatctctggaaaaatcaatcaatcgccggaaagccgcaagaaattggcgatgggaggcgctccgggagaaaccggtatcatttccggaaaagcaattaaaaaagcagctgcccagaggacagctgcccgtctttattctggccttacggaagtttgtgctaaaaattcttcgtcatccggattccttccgtaccgtttcccggtgttcaatgaagcgattttttccatgtcttccggggttaacgagaaatcgaaaatctcgctgttttctttaatccggctcggggtcaccgattttggaatgacgacaatgcctcgttccacgtgccagcgcagcacaatttgcgccggggttttgccgtattttttcccaagctcaaccaaaacaggctgctcaagcaggttgtttttgccctggccgagcgggccccatgcttcatgtaaaatatgatgctgtttcagaaatgcatgcagttcattttgcggaaattccggatgtgtctcaatttggttgatcaccggcaccacttcgctatgggccagcaaatcttccaaatggtggatttggaaattcgatacgccgatcgcttttactttgtcttcatggtaaagttcttccattgctttccatgtttcaatatatttcggtgacggccagtggatcaagtaaagatccaaataatcggtgccaagacggtcgaggctcgcctggaaagcggcttttgtttcttcatagccgtggtcgtagttccacactttcgacgtaatgaagatttctttccggtctacgccgctttcccggattgcatcgccgacatatgtttcattcccgtaaatcatcgcagtatcaatatggcggtagccggtttccagcgcggctttcacagcgtttttcaactcattttcttcttttacaagaaaaacgccgaggccgagttgcgggatttcaacgccgttattgaatgttaattttggaatcgtttgagccatccttcattccttctttcgcttagatatgtaagtgtatgatgattttaacacaatcaggcagaattttgcacgcacaaggactgtgagcgcaagttttgacggttgtaacaccggtttgttatatttggaacgaacttttccgccatttacatagcggttcaggtgcaaaaatatcaggcgtaaggagtggttttgcaatgaatgatttatttaccccgtacaagctgaaatcgcttgaagtgaaaaaccgtattgtcatgcctcctatgtgccaatactccgttgagaaaaaagatggcgttgccactgactggcattatgtccattacgtcagccgtgccatcgggggtgccggcctgatcattattgagatgaccgatgtggagccggacggcagaattaccgacaacgatctcggcttatggtctgatgaacagatcgccccgcttgccaaaattgtggaagcgtgccatcagtacggcgccaaagtcgggattcaaatcggacatgccggcagaaaagcacaggacgcaaaacagccggttgccccttcccctatcccttttgatgacaatgcaaaaacaccgaaggcattaacgaaggaagaaatcaaagaagtcgtccgcaaatttggcgaatctgtccgccgcgccgtccaggccggttttgacacgatcgaactccacggcgcgcacggttatctgatccatgaattccagtcgcgctatacaaacaaacggtcagatgaatacggacaggatttggcattattcggaaaagaagtcatcgccgctgccaaaaaagaaatgcctgctgacatgccgcttattatgcgcatttcagcccgtgaatatgtcgatggcgggtatggcattgaagaaagcattgcattttcgaaggcgtataaggaagcgggtgttgacctgtttcatatcagttccggaggcgagggccctatcggtgcagacgggcgcccggggacgcacgctgcttaccaggtgccgcttgcacgccggatcaaagaggctttaaacgttccggtcattgctgtcggccggctggaagacccggttcttgccaatgcggtaatcggaaacgaagaagcagatcttgttgcggtcggcagaggcatgctgcgcaacccgtactgggcgctcgaagccggtatcgtgctccgcaaagacgcaggtattccggtccaatatacaagaggatttccaaaaagataaggaaggctgtttgcagcggccgcccgtagaagttcccgaagcgaacacttgaagccggtaccgcgctggaaaaacggtccaatatacaagggaatttccaaaacggtaaggaaggctgtttgcagcggccgcccgtgcattctggctgaaaggataaaaagcgaatccaaaaaacaggaaaacagcatacaaaaaacggggccggaaaaccggacccgcaaaaataaaaaaagggggaatacttatgatagtgcggcttcccgaaagtcgccctcactaaggaaagcattgtagtattaggatagccgttgtgaatgaaatttaaacctcttataaaattatttttttccgagcgcttccaaaaatacggaagcggctacatcaagaacagtggagagttttaatattgtctgtgtggtcggaatttgttccccggtttcgtactgttcgagtgtatgtttgccaatccgggctttcacggccagttcttcgatgctcatcccgtttaattcacggtaaaatttcaacttctcaccaaagctattcatgagacgccctcccttaacgattattttaaataaaaatacttcctttccatattcatttctttattttattgtagcatatgggcgggtggcaggctgaagcaaatttttgaacttttttaaacacgggcaagttaaaaatgataaatataggttccgggtgcctgccggggctaggcctgaaaaatatttggggaatgacatgcactcgtgactatgatataatattttattgcgtataacaggaaaaaacaatactaggagtgttttcatgtcaaattatgaagcaggaaatgtatacaccggaaaagtgactggaattaagccgttcggcgcgtttgtagcgcttgatgaagagacacaaggccttgtccatatttccgaaattaaacacgggtatgtcaaagatattcacgattatgtccacatcggggatgaagtcaaagtaaaagtgttgtcggtagacgaagaaagcggcaaaatcagtctttccatgaaagcaacggaagaagcgccgcatcaagacacaaggaaaccgcgccggcgccaaggtgccgtgaaagccgccgaagagtccggagaaggtttcaacacgctgcgcgataagttaaaagaatggattgaaaaatcaaaacgtgaagatttgattaaaaaataatcgggcgattccgggcatacagattgtccggattttttttatccgaaaaacgccgggtctgcgggggataaatccggtgtatggatctcagttccgccgtgagctggctacaaatcccgcttacgccgctgcccaatttaaagtgcgatgcaaaccgcttgtacgcgcaagcccgccggatgaatggcgggcgccgccgtttctatgaagaatagtttcttaccacgatttgccgggtgaatccgtctgaaaccacgtgccatgttgctatgcagaatagtttgcctaacgcggggaaatctgcccgcgtattattctatatatagcgggatataaatggtcaattccggttcatcgcttaaaggttcgtatgttgccggataatcttcacggtgctcaagctgcccctgaaagacggtatagccgtttttcctgatccatttatacaattcggcatacgctttttgcacgcctttgcctttatatttcgcagccgcaaatgtatacgaaggaacagtcagggctgtcatgccttccggaaccgcttctatgtaggccacttcgcggacaaggtaaaaggaaaacaagccatcatcatcctgcgggtggtaggaaagcccgatcacaacaccgggatcggtgcaatgacggatttcccccattttttgcttaaattgatggaaaaatcttttgatatccccgtttgccgcctgctcgaaggtaccggtccatttgctcccgaccgcgttaaatgcgtgtttctgaacaatttgaatttccaagctgcacacttccccgctaatctttatagcttcattttaaatgaaaaaagaagcgggcgtaaaggaaaaaaagataaaaaaacacaaaaaaaggcaggcatgctgcactgcctttgctacaatgaatacggtttcccacggccggatcacttatctcgtcggttttgcctgggtagtacgttccaattcggcatccggtttgaaaagcaggccgaggttaatcaggccgcaaatgccgacaatgccataaatgacccgggagatcgcggaattgtccccaaaaatggccgctaccagatcaaagttgaaaaaaccgataaagccccaattgatcgcgccgataatcgtgaaaattaacgcaattctttgtacaatgctcatttttttacctccttgttcaatgtacaggaatagcatggcaagaatccgcaaacattatgcatgcaggaaatgtgagaaattcgttacattccttgcgaaaagggtaaagattcgataaagtggagatggtaaatcgataacaggaggatctggacaatgacgcatattcagtttgattattcaaaagcgctcgcgttttttaacgaacatgaaattacatacttaagcgaaccgattcgattggcccacaagcttttacatgaaaaaaccggtgtcggcaatgattttaccggctggctgacattgccaaaagattatgataaagaagaattcgcccgtatccaaaaagcagcggcaaaaatccaaagtgattccgacgtgctgcttgtgatcggcatcggcggttcttatcttggtgcccgtgccgcaattgaaatgctcaaccacagctttatgaacgtgctgccgaaagaaaaacgcaaaaacccgcaaattttcttcgtcggcaacagcatcagctccacctatatgaaagatttaatggacgttctggaaggcaaagatttctccatcaatgtcatttccaaatccggaacaacgacagaaccggcgattgctttccgtattttcaacaaactgctcattgaaaaatacggcgaaaaagaagcaaaaggccgcgtctatgcgacaacggaccgcgcaaaaggagcattgaaaacgctggctgatgcggaaggctacgaaacattcgtgattccggatgatgtcggcggccgttactctgttttaacgcctgtcggtctgcttccgatcgcagtaagcggcgtcgatatccaagcgatgatggacggggcggcaaaagccgttgatgatttctcgaaccctgaagtagcggaaaacattgcctaccaatatgcggctgtccgtaatatcctgtaccgcaaaggcaaaacgatcgaaatgctgatcaactacgaaccggggctgcaatatttctccgaatggtggaaacaattattcggcgaaagtgaagggaaagaccaaaaaggcatctatccttcttccgcaaacttctcgaccgacttgcattcccttggccagtatgtccaggaaggccgccgcgacttgtttgaaacggtcgtaaaagtagagcaggcgcgcgaagaactgacaattgaaaaagaagaaaacgatttggatggtttgaactacttggccggccgtaccgttgactttgtgaataacaaagcatttgaaggtacattgcttgcccatacagacggcggcgtaccgaacctggtggtctccattccgaaaaccgatgcatacacattcggctacctcgtttacttctttgaaaaagcctgtgcggtaagcggctatttgaacggcgtcaacccgttcgaccagcctggtgtggaagcatataagaaaaacatgttcgcactcctcggcaaaccgggctatgaagatttgaaagcagaactcgaaaaacgtttgaaataatgcagaaaaaagcagggcaatgccagccctgctttttttcttggataaggcaaacgcaagccaaaacttccagctgattcagatgaagccgcttctcaaaacgaagcaatcttcgtagtgcagcatatcagatgtagcataaggtgcaagccgctttataaaaatgcgcaatctgcaaggcacgggatcagctgcttttccaatttggccgtccactgctgaacatccgcctgcaccggttctcggttattttatcgccaattcgctggaaaattttcctggcaaacttttgaatggttacttgcctttttccaaaacgacaaataaatgctcttcatccgtaatggtataatccaagggcggattgatcatggtgtcatccctcgattggatgccgattaaaatttttcgctctttctgcagctgccggctcaaatcttttaccgtcaaattccgccacttcggcttcaccggaataaagtcaagatggtttttttcctgctggttcaataacgacaaaagcgtatcggacatcccgtttgaaatcaggctgttcagcatgacaaagcttgcctgtatatttgcctggatcacttcatccgcgcccgcccgcttggcatttactacctggtcggctgtctggatttccacaatacaatatgcatccgggttcaagcctttgacagcaagcagtgtcaggactgcgcccatgtctgcttccgtctccgttttatgctggtcggacgtgatcagcactgccttcgccgcccggacatttgcttttttcagcgtctcgtcctgatacggctttccttttataaaatacacattatcataaggataagggttggattcaagtgtttcatccaccaatacaatgggctgccgctcttttaattccatgagctgcccgattacttttctggcgcgttcgttccagccgataatgaccatttgttttcctcccgtaaacaccgcttttccttccaaaaaagcgttttgccgtttagccgttgcaccggccagcgccacgaaataagcagacagaatgccggcacccgataaaatgaggatgatgccgatcacccggcccgcaaaagtgaccgggtacaaatccccgtaaccgactgttgctgtcgtgatgactgcccaccaaacaccatcaaacaccgtcgggaaagttttcggttcgacaaaatggatggccagcccgaatacaaagatcacagcaagggccaggttcaatatccggacaatgatcggccagcgtaaaaaacggtaataaaagaaatgaaacataccgtccacttccttttttggtatcttcattagtattccccggccgcaatgcgaaaaaacaaggcggcaaacgggaaactattttttaaaaaaatagttgcacaatcattttttgcattgtataataacattgtcgctgatgaaaaacggtgatcatgacaaaacggggcattagctcagttgggagagcgcttgcatggcatgcaagaggtcagcggttcgaacccgctatgctccatcacacaaaacgtccaccctgttacaggtttgggcgttttttcgtatatgcgcccctgaggaaaaataaaattaacccctgaggaactgtcccgttatagcccccaatccgacaaagcttgaggtccgggacccaaagctgcttccccggctgccaaatccttttttatcatgatcctgctttgcctcacatatatttttaccaaatccctgaagtaaggaggtgcggccttgcttgtccttaacggaagtgatgtcctcaaatcggcctccatgcaggaaatggttgcagctgtagaagaagcataccgcatctatgaagaaaacggttatcaaatgccactgcgcacgcattttaccatccggaaccactccgtcctttttatgccgtgcagcacaaatgaggcagccggcgcaaaaatcgtctcggttttcccgggcaacaaggaccggccggtgacacagggcgctgtcattttggttgacagcaggaatggatccatgaaaacgcttatggacggcacggttttaaccgggctccggaccggggcaatcggcggggcggcggcaaaatatcttgcgcctggcgatgccaaaacggccgggcttatcggcacgggttatcaggggctgtatcagcttgccggcgtttgcaccgcacgcaacatcgaaaacatttttttattcaaccggacaccttcccacattcccccatttattcgccggttcaaaacgctcattccaaatatcccggtccatacagccaaatccgcccgcgaacttgccgagaacgccgatatcctcattacggcaacatcatctgccacacctgtactgccggaagaagacctttacgacggaaagcttgtcattggcatcggttcataccagccgcatatgcgcgaatttcctgatgcgcttttgaaaaacttgaaatcgatatatctcgactcgcacgatgccgcaaaggaaagtggggatgtggacagccggcttgaaaccattccgttttccaaaattgtcacgcaaaaagtaaagccggatccaaacacgctgcaggtttttaaatcaacgggcatggccctgtttgacctggtggctgcagaaacggtttacgaaaaagccatacagctcgggatcgggcaaatgctcgatttttaaagggggaacagcgcatggaaaaatatttgaattacattgacggcgagtggtgcaaaccgtcaacgggaaaatttgccccggttgtaaatcctgcaaacaggaaaacattgggcgaagtggcgcagtccgaagcacgggaccttgaccgcgccgtccaggctgccaaaagcgcgcaaagcatgtggcggctcgttccggcacctgagcgcgcaaactatttatacaaagtcggagaactgttaaaacaaagaaaagaacagatcgcgcgcacgcttacaagcgaaatgggcaaggtgatcgatgaagcgcgcggggaagtgcaggaagcgatcgacatggcattttacatggcaggggaagggagacgccaattcggtgataccgtgccatctgagctgcaaaataaatttgcgatgagcatccgtgtgccggttggcgttgccgggctgatcacgccgtggaattttccgatcgccattgcttcctggaaatcactgccggcgcttgtaacggggaatgcggtgatttggaagccagctacggaaacgccggccacagcatgcgcatttgtaaaaatttatgaagaagcgggactcccaaaagggcttgtcaatcttgtccacggctccggttccgtgattggcggagcgatggtggaacatccgggcatcggcctcatctcttttaccggctcgaatgaagtcgggcgtaaaatcaatgaacgggcaggcggccttctgaaacggacttcgcttgaaatgggcgggaagaacgcagtgattgtcatggacgatgcggatcttgatctagcggtggacggcatcctttggggtgcatttggcacgagcgggcaaagatgcacggctacaagccgggtcattgcccatgaaaagatcaaagatgcactagaagaaaagctgatccggcgaacggcggaattgaaaatcggcgacggcctcgatgaaacggtggcagtcggcccggttatcaatgtagaagcgctcgaccgcatccaccagtatgttgaaaccggcaaaaaagaaggggcaaggctgcttacaggcgggcgcattttgccgggaaaaggatattactatgcgccgaccgtttttacggatgtcagcccggaaatggtcattgcacaggaagaaattttcggcccggttgtttcgatcattccggtagcaggccttgaagaagcgattgccgttaacaacagcgtcacgttcgggttatcgagcggcatttttacaaaagatgtgaataaagcttttcaggcgatgcgtgatttggataccgggattgtctacatcaatgccgggacgacgggggctgaaatccatctcccgttcggcgggacaaaaggaacgggcaacgggcaccgcgactcggggcccgcagcgcttgatgtatacacggaatggaaagccgtgtatgtcgatttcagcgggaaactgcagcgcgcccagatcgacaatcattaaagggggatgggatgaaaaacaaggcggatgtgatcattgttggcggcgggattatcggttcgagtgtggcgtaccatttgctcgcggacgggtttacaggcaggatcattgtgtttgaaaaggacccctcctatgcatatgcgtcaaccccgcggagcgcaggcggcatccggcagctttttacaacggggattaatattaaaatgagccggtacagccttaaagcctatcaaaatttcacccgtaacatggccatcgggaacgaaacttttgaaatcgatttgaaacagcgcggatacttatttctagcggcagaaaaaatgaggccgctttttgaaaagcagttaaagctccagcaccaaaacggcatcttatctgaatggcttgggaaaacagagcttgtggcgctcattcccgaattaatcacgcgtgatcttgcaggcgggctgtactgtgcggaaagcgggtatttggacccgtacacggcgatgcaagggtttataaaaaatgcgaaacatctcggcgcggaatatatttatgaagaagcggactgctttttggcggaagagggccggataaaaggcgtgcggctcaaagatggccgggcgttttttgcgcctgttgtcgtgaactgtgcgggcgcctgggcttccggattgagcagcaaagccggattgccgcttccgattataccggtaccgcggcggatttttatgtttgatgtggaaaaaccgcttgcaaaaccgttgccgctgacgatggatccgactggtgtctatttccggcacgaggggcgcaaaatcattgccggatacggggaagaggaaaagccggcgatcgacttcagctggaagcggtccgaatttgaagagcagatttggcctgttcttgcgcagcgcatcccgaattttgaaaaggtaaaagtcgaacgcggctgggccggcctttatgactacaatactgccgaccataatgccatcatcggcgagcatccggaaatgaaagggtattttgccgcgttcgggttcagcgggcacggtatgcagcaggcgccggccgtcggaaaggggctgtcggagctgatccggaccggaaagtatgaaaccattgatcttacaccgctccgggtcgaacggtttgcggaaaacgaccttgttacagaagatgccatttattaaaagggcatcttctgtttttgccaaattttccaaaccacatgttatagttataataacggagagggagggaatacaatggagaaacattacgatgttattgtcgttggtgccggttcaatgggaatggcagccggttattttctggcaagccagggtgtaaaaacgcttttgctggatgcttttgacccgccgcatacatccggcagccaccacggcgaaacgagaatcatccgccatgcctacggggaagggcgggattacgtgccgctcgtgttgcgggcgcaaacgctttgggatgaactggaaaaggcctccggagaaaagatttttgccaaaaccggcgtcctcagtttcagcccggaggatcatgcggcctttttaaacgaagcagtcgaaagcgcaaatacatacaacctcccgattgaaacgatggccggcgtggaagtggaaaaacgctggcccggcatttcgcttcccgcgggctaccgtgccatttatgaaccggatgccggcgtcctgtttccggaaaactgcatccgcgcctgccgtaaactggcggaagcaaagggtgcgcgcctgcttgccaatacccaggttacagatctgaaaaccgacggccggactgtcactgttgtaacagaaagcggcacattcaccgctgaaaaatgcattgtcagcggcggtgcgtggaacgggaaactgcttgaaaacttagggctcaatttgccgcttcagccggtccggaaaacggtcggctggtttgaagcggacgaagcgctgttcaatgcagatgtgtttccggcttttacaatggacggatacgaaggaacatactacggttttccaagttttaatggaagcggcgtgaaagtcgggcgccatgacggcgggcaggcggctgaccctgatacaatgaaccgggaatttggcgcataccgtgaagacgaaggagatatccgggcctttttgaaaacatacatgcggggggcagccggtcgcttaaaaaagggaaaagtatgcttgtacaccaatacgccggatgaacatttcatcatcgatacccatcctgcatatcccaatgtggccatagccgcaggattttcaggacacggctttaaatttgcaagcagtgtcggagagatgctcagccaaatggtgttaaaagaaaatgccgaaagcccattgccgcttttttcaattaaccgggcggctcttgcatgatcatcatcgcagcgtacacagccggacagaaaaaaatagtttttttcatgaaggaggaaaaatgtttttatcgtatccgattttatccgctttacttggaatgcttgtagcacaaatcataaaagtgcccattcatttcatcacatcagggaaatttgactggagaatggcgttcagtacaggcggaatgcccagttcgcatacctcgatggtcattgcccttacaacggcgatcgggctgacttccggattcggttccaatgcctttgccatcagcatcgtgttttcatccattgtcatttacgatgccaccggtgtgcgcaggcaggccggcttccatgcagaagtgctgaaccgcctgctcgccgactttaaccgcctcatggagacaatgaaagatccggagacaacaaatgcggaatcccggcagaaactgaaagaacttttagggcataaaccggcagaagtatttttcgggatcattacgggcatcctcactgccgtgttggcattcatattttatccgttttaaaatcgcaaaaaaaagaaaggcggcgaaaagagacaacgccattaaaaaagtgattttgtattaccatgcatacaacatatagaatgcaaaaagacgttgaaacacaaatagcaggagtgtgtcaacgtcttttttatttttgcagtgctttttcagtggcttcaaagagacaacgccgccttttaaattgggcttggaaaggatgccaaacatgattttaggaaaagctctgcgcaccttcaacatgcggatgtccggggccggatgcgtcaataaacgttatccccgcagcagcgattccgtcccgtcgatatagatgtctgtgccgctaatatggctggaatcgtccgatgcaaggaacaaaacgagatcggcaacttgttccggttttcccggcccttcggaaagcggctggtcgccctccggaaattcagccggaatttgcactttctcgagcgcttccgtacggttcgtgttttgctcgatttttgtttcaatcgcccccgggcaaacagcattgacccggattttatagcgggcaagttccaaagcggccattttcataaatgctacctgccctgcttttgaactgctgtaggcggacatgccgatgttggaaaaaatgcggttgccgttgatcgagcttgtgatgataatgctgccgccgctatttttcatatgcgggattgcatattttgtcaggagaaaagtcccttttaaattggtcgacaacgtttgatcccagtcatccggggacaaatcttcaatcggtgtcactgtcccgttaatgccggcattggagaacacgatatccagccggtcccattctccgactgtcttgtcaacagccgctttcacctgttccggatcagcgacgtcgacttccaaagccattgcctccccgccattttgttcaatccgtcttttcacctcatccgcccgttcctgttcaatatccattacgcaaacttttgcgccttctgcagccagtttcaaagcggacgcttccccgatgccggaaccgccgccggttataatcgctactttatctttcaatctcatcttcacttactcctctccgatggaatacgacagtagtttacccgttcttcaactgtttgtaacaaacagttgaagaaggttgttgaaaaagagaagccggggaccattcgattgggtgttttcccggggcaaatgggcacgcgctgccgtttatgagtaagacattagcgttcggaaaaacggccgtttccatgcaccggagcaatatcacctcatattgattgtacggattttttacgatataatcaatatatacgaaatttttccgcacaaagtgaggtgaatggatatggccaagcaaaacaaagctttcaagtttcgtttgttaccaaacaaagaacaatccgcattattagctaagacatttggttgtgttcgctttgtctacaataagatgttagctgaacgcaaagaaacgtatgaaaagttcaaggatgataaagaattgcttaaaaagcaaaagtttccgactcctgcaaaatataaaagtgaatttccattcctaaaagaagtggattctttagcatatgtcccattgccgatgaactgcttgaatgcagggcaactgatccgtgctttacgcccactgacgggcgtacaggctgcttgagtagttgagacatcctgatggattgtttcaagttccgttgctttctctcgcttcttgaacggtgtttcagataggcttctctcaatgtcccattgagtatgccttgtttgattttcaccatggcttctgcgccaagttcactccaatgcatgcccctttttttcatcctgaaggagatatgcctttgattcgattccatcgctcccaggcctctcgcaccttccaaaacttgacacatacattttccatgaaaactgccggattttttcatacatgttaaaatagaaggtgtatttagttgaaaacaaggcaggtgtccgttttgtttccatttttccaccgaaaaagaaaggaagagcatatttttgcgccaatgggaggagaggtgacgccgattgaggatgtgcccgatcccatcttttccaaaaaaatgattggagacggcgtggcaatcaggccgttagaggggcgtgccgtttccccgtttgacggcgaggtgatccaagtatttccgacaaagcatgcaatcgggttgcgcggggaatcagggctggaaattctgattcatatcggactggaaacggcttcgcttgaaggaaagggttttgaaacgattgtgcaggcgggggacacagttaaaaaaggcgatccgttgattcgctttaatctggaatttatcaaagccaatgcagcggatacgattacagcgatcatcattacaaacggagagcttgtaaaatcgctcgaaaaaagaaccggggttgaggcggttgccaggcagacggaaatcatgcgggcttgtctgtgaaaccaaaaaacaggctcgaagcaagcggcggggaaggtggcgcaagccggggtgccctgcgccgcaaaaagaaaaaacaggcttgtgcaagcctgcttcttacttgtatggttcgcatgcgtatccgtccttgtcgccgtccatataggagcgataagcagggtttgaacgcggcacgccgtttggatattttttgcgcagttctgtacagttttggaaaccactgctcccgttgctggaacggctctccccgccggaagcactggatgcggaactgcctttttcgcacccgttaaaaccgcggtctgttgcatacccgggttgcgaccagaccctgagcttttcgtttttagcccgctgttcggcttttttgaaagtgcccaaatattgatagggcggttcatacacataggccacgcgcgcgtacccttctttcagcagcttttcctgcacggacttgccgtttacgaatacataagcgaggagccgcccgtatttgtcgcgttttgccccgtgatcaaattcgatcgtcagtttgccgcttgaaacgagctgcttgttccggtaataggccgcttttgcatacggctgtacgcacatacccggtttttttgattccggcgtgtcaacgagcaaatagcggaccgtctcttcttttccatgataataaattttaatcgtgtccccatcggtaacaccggcaagtttaacagcaatttgcttgcctgccgtttgccggttttctcccggcccggtatttgtttgttgcgctgtttttggttctgtgcccgtttttgtgctgttttgatgcagcccgcaccctgcaacggcgagcatcatagccaaaaagagcgtgaaccagcctgctgtttttgtcttcatttccccttctccttgcttttaaaaaatgtagcgcccttattttaccatttcaagcgggtttctttaagcaatccatttgacaataataccacctggggtatatgatgggggttgtaaccgaactacgggcaggaggtcatccgtataaatgtatattgttttgctcgttcttgcgctcattctcacgaaaaccggctatacacgttacgttcccgttcgcggtaccgtgcgggcggatttaagaaaagatgtgattgaaaataaagtggtggtcgatgtgagggattaccagcatgccggaagcggtaccggggatgccattgtgattccgacggcttatttaaagcggttttccggcgaaattccaaaaggcagtcttcacctcattgcttccagccggcttgaagccaatttcagcatccgtttattacgcagaaaaggatttcatattcattcttatactatcttggaaccggggagggaaaaaggtggaatacgatgcgcaaatcaaaaaccgtgtcaaaagaatcgaagggcaattgcggggagtactgcggatgatggaagaaaaggacaactgcaaagcggtcattgcccaattgtctgccgcccggacggcaattgaccgcacgatcggcgtcattgtcagcaccaatctggtggaatgtgtgaaaaatgccgaacaaaacggggaagacgcgggaagccttgtaaaagaagcggtcaacctgcttgtgaaaagccgctgacatcggcttttccgcaaaatcatcgctggcaaggactgcacttttcgaaaaagaggggattttgttttacgagggaggaattttgatgaaagaaatttctgcgaaggaagtcgaggaaaaactgaacaagggtgaaaaactcaatattatcgatgtgcgcgaaacggaggaagtggcggaagggaaaattccgggcgcgctgcatattccgctcggtttgctgggattccgcctagaggatcttgaccgttccaaagactatattgtcgtttgccattccggcgggcggagctatatggcatgccagtttctcgaaagccagggttttgatgtcacaaacctggaaggcggcatgatggcctggaccggtgaaacggaatgaaaaattttcctcttgatcttgcggtgcataaagcgtagtataagagtacaagctgcgttgtacgtaatattaataaagttttaacctttaaaatgttatagggagtttaacattattgcgggaatgccgagccttttgccgtttggcagggaggatggcaggaacgcttttgcggacacccactttgaggagtgtggttctaaaactttcttagtttaattacggcaactgcggcacatacataatctgttaaaccccgtcctttttagaagggcggggttttcccattcaagaaccggatattccaagcaaaccggaggcattagctgagcctgttatccttgcgccccggaggcagtgcccggtccatttttttcacgtttatctgcgctcggtattacggggtgtataataaaactaacaatgttttgacatgcaggagtgggaaaacgtgaaccaaatgaaatacattgagcctgccgtgatgtttattaccatgatcgtctatgtcgctatagccgtactgattggcattgtggccggaaccacggtcggtttgtttttgaaatctttaaattttttaagcggaaaaacaggtgcgctgcccgtgccttataagatgctgctgcttccggtcggcggcctgttgaatggcctgttgttgtataaaatgaaaccgggggcgccttctgccattgctgctgtgcactcggaaggggaaccgccctttgacagaagcttcccggtcaagtatctggctgccctcattacacttgtatccggcggttcagctggaaaattcgggccgagcgcccactttgccggttcacttgccgcatggatcgggaaaatttttcatattcagccgtttcttcgggcccagctgatcgtatgcggaatcagtgctgcttttgccagcctgtttggcgcgcccgttgcggcagccgtgtttggtttggaagtattggctatcgggtcaatccggcaccagtttcttttcccttcggcggtttccggcatagccgcttttgaagtcaataaaaggctgttgcatacgccttatgaatatttcatgatccatgccatgccgtctttttctgttctgctgcttttaaaagtggctgcccttggcatgatttgcggtctggctggatggctgtttgttgaatctattgagcaggggggccgcttattttcggttgtccgggaaaaattgcatcttcctcccttcctgatgccctgtgttgggggtatgctcattgctgccgcattattcatttttcccgccgactttttggggctgagcttgccgcttttggacaaagcgatgcacgggggccatgtcggctttttcgcatttctgtggaaaatcctgtttgtggcggttacgcttggttccggcttttacggaggaacattcaccccacagctcgtcatcgggtctgccgccggaaatgcatttgccgctttgctcgggataaatcctgtattaggggcggctgcgggcatgctggcggtggtttcagctgcatccaatacgccggtttccgctgtgctgcttggatatgagctgtacggtcatgttacggggatgtatatattggccgcctgtatcgctgggtatttgatcatcgggcaccgcagcgtttatcgcgaccagcttgtgtacgatccaaagtctttttgggtgcagctggagccgggggtcgaactgaggaaagaatccatccgactttcaagcggcactgcaaatcagacaggacggttccatcttccgtggtagtgggaaaagccgtttatgatcaggcttatgttaagcaatcttattaaaaacgcattgatcttagcatagggccgctctgcggaaaggaagctggtcaaaagatgcgcctatcttaacatagaggcgcctatgttaaggaagcccgccaaaaaacgtatcaactttaacatagggccgctctatataaaggaagcctgccaagttttccgcctatcttgacataggagtgttctgcacagaggaagcgtactatatatttacgcacagacgccctaagaaaagaaaggccgctgaaatacgcgtcttcttaacagattctgcgtaaaagaagcgtgccaaaatcgcgccaatcttaacgttgggcagttttgcgtaaaagaacttcgcggaccggctgatcttttgcaagaagcgttcaaaaaaccgttgagaatcgtctcaacggttttttgcggcagccttctcgctttactcggtttccccgagtccggtgactttgttcatcacattttgaatggtatcagccagcccttcttcctcttcgctgccggcattttgcgactggacatttccttcgagctggttattgtacgagtaagtattggatttgtaacttttttcttcttccatttttatcacctcccaaacatagggtgtgttaatcggaagttttttaaccaatttatggcttaaccggttttctatccagcctattaaaaatgcgatatagcggaacatttattcactaagtacgcagacaacgccatattgccctcatcggctctgctccgaatcattgcaccaactgctttttatccttttttggtgtgctttcatcatggcatggatctttttgtcaatgacaaagcaaataaaaaagaagcgtaatgatacgcttcaaaatggaggctgcctgagtggagggggacttttttctctctagtttgctgattatgcttaatatccggagccacccatataaaacgctcctacaataataagcaggataaagagaacgacaatcagggcaaaagatgtgcccgtgctgtaaccaccatctgtcattgactttcacctcctttccttaagatatcttgtattttaaaatatgatgtttcgaagaaaggtgtaaaggacaaacgtaaaagggatgaagaaaaggcgaagtggctttgctggcactaccaaaaatgccggcatggaaaaggacgattgtgatagaccacttcattttttctgatcggtttcaacatatgcctgggaactgtaacgacatttgtacggttcacttccacgagtggatggatgatgggttggaaacgcgggacaaaacaattgtgaattatgtatcttggggtagcaattattggtctgcaatacaattgacacacctcctcatcgtaaattctctacattaaatgaatgaatcactggattggaatggacaaacatcttaatgaaaaagaaatatacgtttatggatggatggaaggacagagacagggggcattccatccggacaagcagcaagaagttaatacgcataaagcatgaaggaatgatgggccataatgggtgaagaaaaaagtggctttttatccccactggaattttaatcaaaggggcattcagttttaatgctgaattgttgacggaatgcgtaaacaacgggcaaatcaccccggctgaaaacgaaaaaaaccttgatgcatccgcgatacatcaaggtttttagtagtcgggaagacaggatttgaacctgcgacccctacgtcccgaacgtagtgctctaccaagctgagctacttcccgattattttatttttgcttgccagctccttagctcttgctgacaaatattattctacgacaataaatttcgtttgtcaaagcctttttttatttttttaaaagaaattttttccggctcggtttcgggccggcagccattcctttttcaactggaaaataagaaggttttgccgcttgggaaaagcttaaaggtttttttagggggaatatcatcgggaatcaccgccgccggtatgatgtcgattcccgtattttccagcgaagccaacattgtttcttcattcggcatttctttatgtttgatggcgcggtccagtaaaattcttgcagctaacgccgggcaatccggaaactgaaaggccataaaaaatcacgcatcgtgcttttaaaatgaccttcattttcatcaccttcagctttatcattcgccatgagtgggttgtgctgccttttacaaacaggcagggggaaaggcgggagggttcaggaataagggaaggtgcttaagtggaacgttttttcaaaaattctaagggaataaaaacaaaaaaacggccatagcagggataagcacgctattcgcgtttcactctgtcgaaatttgactgcagcaagatgtagaataaaatgatcaaacaattaagattttggtatgtgtaaaattttacnnnnnnnnnnnnnnnnnnnnnnnnnnnnnnnnnnnnnnnnnnnnnnnnnnnnnnnnnnnnnnnnnnnnnnnnnnnnnnnnnnnnnnnnnnnnnnnnnnnntttactcttcagaactgcaagattttgtagagtatggtaaaattgtggatattcgtgtatactgaatcatatatgtttgacagtttttgcggatgatgtcggaagatggcagcaaatgaaaaatacggtgagcctttgagcaggggagagagatatgcgcggcaggaaattaaatttcaagggaaaagttgtgtcggcgctcttatttacgttgattgttgttgttttggccggactcgttggcaaaggggaaaagatgtcagcgaaagacaaaggaaaagatgcgcatgctgtatcactgcgcactttatctttttcgcctgcgccaatgacagtgtttgcgggttctcctttgtacaaatcgatgatcgggcaacagcggcagaaaaaagaagcggagagacagaaagaagtggcgaagcaaaacgagaaagatttgaaagaaaatgccatttacttaacatttgatgacggcccgtcgagtgcggccaaccagttattggatctgttggaagcttatcagatgaaagcgacctttttcatgctcgggccaagaataaaagagcatccggcagtcgtaaaacgcatgtacaaaaatggaaacgggcttgccttgcacgggatcacacataaagcaagagcgatctacagcaatacatccgcgccattacacgaaatggctgaggatcaaagaatattggaaaacgtcacgggtgtaaaatcttatatggtacgcctcccgtatggaagtattccgtatttaacagatgaaatgcgcgatttactggataaaaatgggttccatatttgggattggaatgtggacagcagcgactgggagttaaaagatgcacggtatgtccagtatacgattcagcaaatccggcaaaaaaaacaggcaggggaaacgccggtcatccttttgcatgacaaaccggaaaccgttaaatatttgccgaagttactaaagtttatcaagaagcagggctataaaacaaaagtactgaccaataaaacgcccgcggtaacgtttccgtgtgaaggccgctgtcatccaatccgtcatccagttgaaacggggagaagatgagggtgaaaagatttattgtattcggaatgatgttgccggggcttcttttgcttcttgccgggtgccattcagacaaaaaacaagcggacagcatatacgaagaattaaagaaatccgcatcctatgaaaaagattttgtcgcgaaccaggagaagctggaccaatataaagaaaaagtggcgtccatttatgctgatttaaaccaacttgaactgaatgacgaaaaccgcccggaagtgaagcggaaattaaaaacggcggacagctataccgaaaagcagtggaaagagctgaggaaatccaaaaagaatttccaaaaggcatatgaacaatcgacatccataaaagaaaatgtggaaaaaattaaagacggcgggcagcggaaacaggcgcagaagctgcttaccatcatggatgagcgcaaaaaatatatgaacactttttttggtgattataaaaaacaattggcattacaaggcaaattttataaaaatctggagaagttcagcccggacgagttagataatcaaataaaaaaaataaatgaatacaatggggaaatggaacaaacgattcgccaattcaaccaggatacgaaacggtataaccgcgaaaaagacaagtattttaaaaaagcagggctttattaaattgggcgtttttttaaagaggcccgggaccggcattatgccggtcccgggcttctttttttgggacaggaaaacggctggaaaattgggtgatacgatgagattggcaacccggtcaggcgtaatgccatattgctcatacagtgccgtcatgccttgtgatgtatttttatccgtgatcgtttccagcaattccgtgttaatggtcgccggataaattgtcgcagtccggatgttggtcccttcctgtgcggattccatgcgcaatacttccattaaatcgcgtaccgcccatttcgttgcgccgtaaactgccccgcccgggtaagctttaagcccggctacggaagaagttgtaatgatatgccctgatttttgcgcgataaacgttggcaatactgccgcaatcccgtttaaaacccctttaatgttaatgccgatcatgctgttccattcgtccgtttttaatgcggaaagcggggaatccggcataatgccggcgttcaggaaaatcacaactacaccgccgaaagcatctttggcaagccggacaagctcccgggaatcttccggtttggtcacatctgttacccggtaaaccgcctggtcgccattcgatttgatgaaaccctattcagatgtatttgaaagccatattgaaaacagcgttgagtcctggagtaagccgtgaaactaccgtattcacgcaatatttttcttgtgtaaacagtaaaatgcacaatttctgcacaaatgccgggtatctttaaaagaaaggataagcgacaagggggacgtaagatcatgaaaaaagtattagcaggcattttttctctcgcaattctcttttctttaggggcatgcggcaacagtgaaacaaaatctgcggatagcaaaagcgcggattcccattcacacatggaaatgaatcattccggctcgagcgaagtaccaaaaggaatgaaaaaagaaagcaacccaaaatataaaacaggcagccaggttgtcatccacgctgaccatatggaagggatgaatggcgcgaaagcaactgtaaaagctgcatacgccacaaccgtttatgcggtgaattataagcccgtaacaggcggagccgaagtaaaaaaccataaatgggttgttcaggaagaaattaaaggggcggggaataaagcgttaaagccaggaacaaaagtgacattggaagcaaatcatatggaaggcatgaaaggggcatctgctgaaattgtttcgtcaaagaaaacaacagtctatatggtggattacacgccggcgaatggcggagaaaaggtaaccaatcataaatgggtaacagaagatgaactttccgccaagtaattttaaataggattaaaaggggctcttcaggcagccccttttttgccgtgttcaacgttaaatttcatttttcaccatacccacttatatccaacgccccaaaccgtctgcaaatggctgtcaaccgggaatcccgcatttcttaatttatcccgtacattgcggatatgagagtcaatggtccggtcttctgtttccacttcatatccccagatagaagttaataattgctcgcgggagaaaacctgattcggatgctgcagaaacagcccaagcatcgcaaactctttcggtgtcacgctgacaggctgattctggcagaatacttgaaaagataccggatcccattttaatccgtttttttcaatggtttcattctgattttggttggaacgccgtaagactgcatcaattctggcgagaagttctttttcgtcaaaaggtttggatatataatcatcagcaccgattttcagccctttgacaacatccggtttatctgtacgcgccgttagcatgatcaccggcacctggctcattttccggatctgtctgcaaacttcccagccgtccgtttccggcatcatgatatccagaagaataagatcgtaagtttcctcctgaatatacctgattgcctccggtccccgtgttaccttgtcgcaggcatatcctgccggttccaaatacaacgcaagcaaatccagcatcctttcttcatcatctacgagcagcagcttcttcaatgatatctcctccttgaaaccggatttccatagtggtcccaataccttcccggctgtcagcgtgaatatgccaattgtgagcctctacaatttcttttacaatcgcaaggcctaaccccgtaccgccgaaagaccttgatctggacttatcaacccggtaaaatctttcaaaaatatagggaagatcctcttcgggtatcccttttccatgatcctgcacaatgagtttccatgctccatctgctttttttacggtaagaaagatattcgtatgtggctctgaatatttataagcgttatccagcaggttgatgacgacttgttcaaaacggaccgggtctgcaatcagcaggatggaaggatgacacttcactgtcaggatgatccttttgttttggaaagccgggcttaatttatgttcaatttgctttagcatttgaaacagcgggaagttttgcttttggatttgaaatgaattccggtccattttcgccaaatcaaacagattttgaatcatatctgacaatttcgcggcttcttcataaataatatttaaataggtttcgttatccgcacagttgtttttccgcgcaatatctgcataacctttgatgtaagttaatggcgtgcggagttcatgagaaatggaagccaaaaattcgcttctttcctcgcgaagatggttccactcgcgggccaacgtgcggatcgattcagcaagctgtccgagttcatctttactgtaaaccgggatttcaacagataagtcacctttcgcaattttctttgtcgctactttcatattaatcagcggcctcgccagaatgcgggataaaaggatgatcaaaatcagcgtaatgccgaatgcgagaaggccggcgatccagaagtggtggttcatttgtgagatcagctgctgaacttgttttgtatccttaaacatgtagacatagccgtttttaaacgggctgacggatgcaatgtacttttcatcttcccaatgcttttctatgatttttcccttgtgtgtgattttgccaacgggctttgaaatgatgtttcgcattccccggtcgagcgggcgtgaagcaatgatggattttttattgccatttaatacaatcacgatgagatcggatttggattccattacagcaacacggtggatggaatccgggtcattgtattgttccagcacatcccggtggctgttgcttctcactaaaagcgaattgaattcatcttttacacgctctttgactatattttggtgcaaaaagtaaatcacgaatccttccaaatcaatcataatcacaaagaaaatcaagccaattttaaaagaaatatgatttaaatgcttcagcttcgtcacccccgcccgtttggaattctctgcaaaaaattaacttgcttttgaggatgtgttgacccggacataggtttgcccgtcttttcccggtatgacagtcactctttctccaatattatagcaccggtaatatttcatattatgtggcgtaatcaccttcatcacgctttcatccgccaacttgattttcgatttacagcggctcacgcctttgatgtccgcagtgcagtctgtatccgtcagtacttttccggttgtttttgtgccgagctttccggatactaagttgacagcatagagattatttttgccgttttgctggacgttgattttggcttccacttgtttttcgctcagcccggggtctttgttagggctggtatctttcccctggctggttttgctttggcagcttgcaagaatgagtatgcaactcaaaatggctgccaatcctgccaatcttttgctcatgcttttcatctcctgtaactttataatttgccgtctgcaaaaaatgatcaaagatagtataaatcataaatttgaagaaagtatgcatattcgtgtgcttttataaaagatataaggggttgtgaacaaagcgtgaagagggggcgttcctcgaaaatctccacattttctgcacaggaaaattttacgattgatgcaaagaagggggaagtacaaatggaatggttaaatactttgctgtttcttgcatgcccgctcatgatgatcttcatgatgttagggggacatggccatggaggcgggcacggaaaaaaagcccatctggaacatagccatgggatgcataagaggattcagaagttggaagaggaaaatcaaagattgaaaaaaaggctggatgcatttgataaatatgatcagaagaaaacatcatgaagataaagtggcaggagaaaaatgatcctgcctttttagttaagcgaggaatgcaggaaatacagccatgaccattgtcaaaaatgcgccgaagcatgcttgcgctgtgcggaagcttgccggaaaatggcctgacacaaagccggttcccttatcaaaaagggaaccggtttttggcaaaatcaataaaacgggaatgatgtgtttaagtttaagcgaacggaagaaaataaaaattggatcgccggtttaaatcaaggtaaaaaccaatttttctcatggcgctcctaacatcatggaatggatggccggcagaaaacaattcgatgtatttgttttatatttcttggtctccggaacaatgcggcaggaaatttaatatcaaaataaaaaagcaaggatcccagccataaactgaaatccttgctttttgtgatgcggatgaagggacttgaacccatacggtgtttccaccactagaacctgaatctagcgcgtctgccgattccgccacatccgcattattttatttttgttcgcctcatcagcgacaaatttattatataatgcccggtagaaaaaagcaataccttttttaaaattgtatgtgtcaagtttttctcgacaaggtttaaatatcgggtattccaagacactctttttgtacactttcggctaccgtgcttcacttgctcggtgtaattttcggaaaagatgtgatatttccgtataaagatggacaacggggatgttgaggcgcgcgaaattcactcgctttccgcgggcggccggcgagcctcctcgctcgtacctcgctgcggggtctctcctggctcgcttttcccgcaggagtctcgtaaatttcgcgcgcctcaacgatcagtcccgactgagccaggcttaaaatgaaagctctaatattttgcttaaatgtcccattgccgatgaactgcttgaatgcagggcaactgatccgtgctttacgcccactgacgggcgtacaggctgcttgagtagttgagacatcctgatggattgtttcaagttccgttgctttctctcgcttcttgaacggtgtttcagataggcttctctcaatgtcccattggtaaaattttacacatactttaaaatttttttggatccctggaaagcttgttaaaaaaggagccgtgcatgcacggctcctttttgggaaatagtttacgcagccatttcaacgcttttttgtctgtctcttgtaaaagcactcacggcaaaggttacaaccaagttcaaaaccatggcgatgatcccggtatttaagtctttgactgcttgcggcataaacggcaacagcgtcgcaaccgtctgattcgtgatcgtcacataggaaacgacaagttcgcccgccacaattccagcaaatgcgcctgcttttgaaatcgggttatttttcataaagctgaatacgatcgccgggaaaaattgcgtaaccatgctgtaccccatcaacagcagggcaacaatggtttgcccgccgttaaatgtgaagtagagggcaattaaagatacgaccggaaccaaatatttggcgacattggccacttgtgtttcattggcggtcggtttaaatactttaaacaagtttttcgaaatcattgtggatgcgctcatcaacagcatcgaccccggtaccagcgcacataacagaccggcagcgccgatgacaccgacaaaccagtgcgggaagctttcaatagaaagaacgagcagggcattgtcggttgctgctccttcaagtgccggctttacagtcagaatcgccgcaaaaccggcaaagaatacgaacaacaggatcaactgatacagcggaaaaatcaccgcattgcggcggaacgttttttcatttttcgctgtaaaggaggcggcaaaagaatgcggccacgtgtaaaaaccgagtgccgtcagcaaaacggtcgaaatgaaccaatatacactcatcccttggtgcgggagcgcaagaaagccgggttttgcctggtcaatggcatgaaacatatctgaaaagccgccaaaataatgaacggggagataaatgccgagaaaaacgacgacggccaaaaccaatgcatctttcatgacggatgtccaggctgttccgtgtacgcctgaaatcgtggtgtaaatggttaccgcaatcacgccgatccagatggcgacgccggaagaaatcgagccgtaagaagcaatgctgacgatactgccgagcccttttaactgcaaaacaaggtacgggatcatggcaatgatgccgataatcgaaacaaggacaccgagtgcgggactattgtattttttcgcgaaaaagtcggattgggacaacagcttatgttcttttgcataacgccaaatggccggaagcagccaataggaaagaacataagccaatgagccgtaccagagtatataaagcgtcggcccccctttgccgtaagcccatccgctgccgccgagaaaagtgaaagtcgtgtaaatttcaccggcgcttagcaagaatacaaacaatgttccaaaacttctgccgccggttgcccactgttcaaggttcatttgcttgccccggcgcgcccggatgccgagatagagtgacaccagcaaaaagatgaggataacaagaagtgcgctgttcattcggcatcccccctttggtttttcggatcggttttatagataatgaacattacaaccgtcgataaaacaacccacaacacggtccagaacatgataaaaggcattccgagaatcatcggattggtacggtttgcaaaaaacatgccaatgattaaagcaagaaatgggagtgatgcaaggacgaatttcatttgaaaacctcactttttttagtgtaaaaggccaaccggtgaaaaagcggctgatccttttcaggcagttaacgtcaggctggctgcgacgaacgctttcaccccgtaaggcaatacatcctcatccacagtaaagcgggcgtgatggtggggataaacgatgcctttgtccgcatttccggctccaataaaaaagaatgtgccgggtgccttttgctggaatccggaaaaatcttccccgcccatggttggaacgccgtcttgaatggcatcttcaccaaacgtctcaaccagtacttcacgcagctttgccgtgacttccggatcgttaataacgggacgataacctttcacgtattgaaaatcataagtcgccccgtgcgcttctgttacgcctttcacgacgcgttccatcagccggatcacttcttcctgcaacgccggcttaaacgtccggacggtgccgctgatgaaaaccgaaccgggaatgacgttatgcgcagtaccggctataaactgggtcacggaaagaacaacgggatctaagggatcaatatttcttgaaacaatatgttgaaggtttgttacaacttgtgcgccaattgcaatgctgtctattgctaaatgcggctgtgccccgtgtccgccttttccgttaatcgtgatgtagaaagcatctggtgccgccatcatcggtcctgacaccaactcgatttttccagcttcaagcggtgaccataaatgagcgccaatcacctggtccacgccgtccatgacaccggcttggaccatttcttcggcaccgcctggcaattgttcttcggcatgttgaaacagaaaacggatttcaccggcgatttggtcttttaagccggccagaattttcgcggccccaagcagcatcgcggtatgcccgtcatggccgcaagcatgcatcacaccatcatgctttgagacgaaatcaaatgcattttcttcttgaatggggagcgcgtccatatcggcgcgaatggctaaaacacggccgggctttgctcctttcagccgggctaccacactcgtttttgtcgggcgggacaacaccaaacccccgaaagatgcaagcgtatcatatataaattgcgatgtttcgacttcctggaaagaaagctccgggttttggtgcaaatgcctccgccaatggattacatcttccttgacttgttcgaccaatgcatctattttttcgacttccaaagataatgccatatcagaatccctttcttttatcctatatttctattttctttattgatttaaagaatttagagtattataacatcacacagtcttatattgcaataacaatttggtttcatgtttagcttttttccaagaaagtataaaatgaacggaatattttgactctgttgcctgctgcaaaaaatagtcaccgcgcaaatagaagtttggttttggaaagattacgtacaatgcatgttttctaataaccattggttccatcagcgggacttcccactgatggaaatttcacttatcttggcgctcccccagctgcatgagggcgccaaaatattgggatgctgttgtaaagcaaataaaagcaatcagctcacttatttccgcatctgttaaatactccttcaaaaccgctgttacatttggagaggtttgccctttgcccgcaagaaaagcttctgcaaatccggtacataccgctgttttttcatcataatcaacggggttcggtttgccttttgctttacaatacaggcagccatttttttgtgcaagtgtacgccggacttcttcttttaacttcgctggcaaccggccatccttttcaaattcatggctgagtttgttccagtatttcagaatggacgcgttatatcccagcaattgttgaaaaggcgtattccctctttcatgtaatggtatcagtgtcatgctcatccctcccaaaaatagtgtaaaataaagcatgcagcttttacatatcgattagaaggtatttgattgatttgaatttcaaaatggaaaggaatttcaagaaatggatttcattgatgaacaaatcatacatgaattgaaagaagacagccgcttatcaatgagcgagctcagcaggcgtgttcatctatctgccccggctgtgagagaacgggtacggcaattagaagaacaggacatcattaaacgctatacaattgaactgaaccaaaaaaagctgggatatcccattgaagccatcattgaagcgacaattaaaaataatcgttacgaggattttaaaaagcaaatatgccagtactcgaatgtcgatttttgttatcgtattgctggcgaggcatgctttatgttaaaagcccgcttccactcatttgaagacgcagagcaattcattgatgaattgcagttatttgcacattctaaaacgagctttgttttttccaaagtggtttaaaacaagtgcgcctatttcaacaggtatcaaaattccagggcattttgccaaatgaatggacgtacgctccaggcatgctgaaataatattcaaaatggagcatctatgttgacatagtatacggggggatggtatattgaaattgcgaaggaggcaaggagatggaggaattggatatcatgatggatgcccgggatgaagctcccgtttgccccgcccacagtgaacggaaaagccaccattcggaaaaagtgaaaaagaacctggtcagcaggttgaaccgtattgaagggcaggtaagaggggtcaaaggcctcatcgaaaaagatacctattgcgacgatgtcattacccagattgctgccatccaatctgccttaaacggcgtgtcgaagatcctgctcgagggccacttgaaaaattgtgtcttggaacggattcaagaaggggatctcgatgtgctggatgaatttttagtgaccatacaaaaaacaatgcgaaaataaaggagcgattgatcatggaaaaagtaaccttaaatgtacaaggcatgtcttgcgaacattgtgtcaaagcggttaaaggaagcgtcggcgacttgtcaggcgtgaaaaatgtagacgttcatttggcagaaggaaaagtggatgttgaattcgatccgaatgaagtgacgcttgataaagtaaaagaagccattgaagaccaaggctatgaagtagcgtaaatccgggcaaaacgggctgtgctttcgggcacgctctcttttttcaaaaaaatatacctatagagggtataaaaggcgtcaggaggaatggatatggccgcatcactacaggaaaaaaaggccgaaagcgtcacgcttggcattaccggcatgacgtgtgcagcatgcgccaaccggattgaaaagaatttatcgaaagtggaaggcgtcaaaaaggtaaatgtcaacctggcgacagagaaagccaccgttcaatacgatccgaaacaggcgaccgtcgaaaatttgatcgaaaaagtggagaaaacgggttatggcgtattagaagaaaaagcgcagctcaatattatgggcatgacatgcgcggcatgcgccaaccgcgtggagcgggcgctgaaaaaaatccccggtgttgttagcgccgccgtcaacctagcgacggaaacggcaagtgttacatacctgccgggacaggcaagcgctgaacaaatgattgtagctgtaaaaaaggccggctatgacgcaaaaataaaaggcgaaatggatccggactatgaaaagaagatgcgtgagaaagcatataaaaagcaaaaaataaaatttgcagttggtgctgtcatctccgtctttttcttgttgcaaatgatctcggatatcgctatgcattacggcggcagcttttctttccatatgaatccatggctacagcttttgcttgctaccattgtgcaaatttttgtcggcggccattactaccgggatgcttaccatgccatccggggcgggagtgccaatatggccgttttggttgtgcttgggacgtccacggcctatttatacagccttgtccttaccatcctcggttccgggcgcatgctttactttgagacatccgccattgtgatgacgctgatcgtccttggcaaactgatggaaaccagggcaaaaggccaaacatcagaagcgatgaaaaaactgatgggcctgcaggcaaaaacggcccgagtcaaccgggacggcaaagaagttgaagtaccggttgaagaagtcgtccccggcgatattctttttgtccgcgccggggaaaaaattccggttgacggcgtcattacagaaggggcctcttctatcgacgagtccatgctgaccggcgaaagcatgcccgtttcaaaaaaagcgggcgatgccgtcatcggggcgacattgaacaaaaccggttcgttccgctttaaagccacaaaagtcgggaaagatacggcgctcagccagatcattaaactggtggaagaggcgcaaggttcaaaagcgccgatccagcatctggcagatcagatttcgggtatttttgtgccgatcgtcatattgattgcactggcgacatttgcggtgacgtattttgcggccggattcaccccggcgatcatcagcatggttgctgtgctcgtcatcgcctgcccttgcgccctcgggcttgctaccccgacagctgttatggtcggaaccggcctcggtgccgaaaacggcgtgctgattaagagcgccgagcatttgcaaatcgcccatcgcattacgactgttgtactcgataaaaccggcacgattacaaaaggagagccggaagtaacggatctcatcccatacggcggtttttcagaggaagcactgctcgccatttccgctgcagccgaaaaaggatcggaacacccgcttggtgcagccattgtaaaaaaagcggctgaaaaagacctgcaactgccgaatgttgcggaattcgaagcggtaccaggccatggcatccgggttaaaatagaggatagagaagttttgatcggaaataaaaaaatgatgcaggatgcacgtatccggattgatgatgtgatcagccaaatggaaagacttgaggaagacggcaaaacggccatgctggttgcaatggatggcgcgctttccgggctgattgccgttgctgacacggtgaaagaaacatcggcaaaagccatccgcatgttgaaagaaatgggcattgaaacggtcatgattacaggcgataaccgccgcactgccgaagcgattgcccggcaggtcggcgtagaccatgtgcttgcggaagtgctaccggaagataaatccaaagaagtggaaaaattgaagcgtgccggcaacattacggcaatggtcggcgacgggatcaatgatgccccagctcttgctgcagccgatgtcgggattgcgattggaaccgggacggatgttgcgatggaggccgctgatattacattaatgcgcggcgacctgatggggattgtcaacacaatccgcttgtcgaaggcaacgatgcggaaaatccgccagaacctgttctgggcttttgcttacaatgtggttctgatcccggtggcagcattcgggctgttaaatccgatcctggccggagctgccatggccttcagttctgtgtcagttgtgggcaataccctgttcttgcgcaaatggcagccggtataaaacgacatatagaaaataaataagccgttattttggtcgatcaaaataacggcttttttgtttcattgctgatgacagaatggacatgtccaaatggattaacaatgtttgttttaaccgcggccctcgttgtggagaagattgcatacgggcaagcaatcatagcgggcatcggcggtttctcatatgatattggatatcctgggagtggtgaatgaaacttgaataggattcaaagaattaaaaacacctattatgcgttcaatattttgtataacatggggattatggtgtttggcgagacgttatatttatatatgaagtccatccatgatagttatgctgatattaatctgtttttatccattttttggattgttggttttattacggaaatcccgtccagcgtgattgcggatacttttggaaggaaaaaacgctgattagcagttgcgtgatcaggagtattggcctgttcctgctgttttttgattggggaaatatggtttttcttattctaagtgcgatttttaccttgcctggcgaatctttaagatcgggcacagtggattcatggatgatagatagcattcgtgaggaagaataggattatccgtttgaaaaagtattttctaataaccaagtattcgggacaactttcaccttattagcgggatatgttggtacacaagttttagggaatatcgattttagctatcctgttttagcgggggctattttacttttatgccccatggccgtagccgtattctttatgaaagaaccggcgccggtggaacaaaaacaagcaggcacttgaaagctgattcagcatcaccatgcattttcgcagatgcctgattttaaatattgaggcaaagcttgctggcaaatcggattcgttcagcaaaccctaatgattgggaaatgaatcattcgtatcatcaatccgttaagataaaagaagatcaaacttttttgcaattgatggaatgtacaccattgcgccaatgcgggatagatgttatcatagatagagcattaccgtgaaacgcggatggttttgacaatggaatagattgtcttaaaggaggagcctgtcaccaagggatacgtatgtcccgcggtggcaggcttttttgctttccgaaaaaaatgaaagggagtggtttgatggtaatgggattgacggttattttgttattggtcctgttcctgccgtttacaaaaatagtggaaaggaatctggaagcctttttgttcgtaatgggcgtggcagcttgtattgtcagccggtcattttcctggcatctagtgcaggaagctcttgtccacccgctcaatatcacgattgctgtgcttgcgatggggcttttgttccgctggtttgagaaaccgatcgaaaaagggatcaggcggatcagccatgcgatgccgtttcgtttgtttattgcgctctttgtcatcatactcggtttgctgtcgagcgtcatcaccgccattgttgccgccatcattcttgtagcggtcatccgttttttgcggcttgaccggaagacggaagtccgtttggttgtccttgcctgtttcgccattggcctcggggctgtgctcacgccgatcggggagccgctttccaccattgtcgtgagcaaactggatgcagactttttttacttgctgagacttaccggcacttcagtgatcccggctgtcattgttttcggcgtgctggctgctttgatcgtcaaaccggggcagtattcaagcgccatggaaaccgcggcgggaaaagaaccgggcatggccaccacggaggatggagggttaaaagctgaaacggcttcagaatcatacaaggaaattgtcatccgcagtttcaagatttacttgtttgtaatggcgctcactttgctcggggcaggatttgaaccatttattgaagcctatttgctggatctcagcccgcgtgtcctgtattggatcaatatggtttccgctgttttggataatgccacccttgccgcagccgaaatcagcccggcgatgaatgataaggcgattcaagatattttgatgggcctgctgataagcggcggaatgcttgtgccggggaatattccgaatatcattgccgcgggaaaattaaaaatctcaagccttgaatatgcgcgctttgcattcccgcttggcctggcagcaatggtcgtttattttgtgatcagccttttcctggtttaaaataagggtttcgtaacgaagtccttatttgccggcaggggcaaagatggagaaaatccggctgctgctgaatatccggaacccttgggcctggccgggaaaagcaagcggtttttgcccagtaaaaagctcaattcagctctctacttctgcagccgcaacttcatccatgccggaaatatggcggtatacatccaccgttgtatgtttgtagctcgcccgcgcctttaaatcgactaaatgggtttgatcttttaaatctttgatccggatattttcaattgtaatttgctgcttctcaatcgcatcgaggacgcatggtatggcatccctgttgcggacgataacttttataatcaggtctttattgcgcaactttgtttgcgctgctttgcccattaaataagggatgatttccacgctgatgataatgagcacgacgccggcaatcgcctccatataaaaaccggccccgacagcaatcccgatgccgctcgccccccaaatcatggcggcggtggtcaggcctgtaatggtgtcattgtctttttttaaaatcacccctgccccgagaaaaccgatcccggaaacgatttgtgcggcaagccggagcgggtccattgtaatctgcacactatgggcatggttgaaaagataggcagactgaatggaaacaatggtaaggaggcaactgataattgagatgacaaggctggttttcagtccgagcggtttccgttttaattctctttccagcccgataatcagccccagcacggctgtaattcccagtttatataaaatttccaaatccccaaaaaccatccggcttcccccccttgtaaaaaatactgttcaatgctgcttctgcgctataaaataaaagtaaataatcaaaaaaaggagaattcgcaatttgaatccttatattgctttaatcgcgggcgtacttgctgtcacatcctccgccattttggtaaaatacagcacggcggatgccggtgtgattgctttttaccggttattctttaccaccatcatcatgctgccaatctttctgacagccagaaagaaagcgaaaatgcgcatgctgaaaaaagatttgctcttttccatcagttccggggcattgctcgctttccattttattttatggtttgaatcgctggatttgacatcggttgcaagttcgactgtccttgtgacattgcagccggtttttgcatttgccggcagctattttattttccgggaaccgctctctcttaaggcgattgtttgtgctgcattttccattttcgggagcatcctgatcagctggggcgattttttcatcagcggaaaagcgctatacggcgatgttttggcgctcgtctcctgcctttttgtgacagcttatatgatgatcggccagtacgtgcggaaaagggcagatgtagttccatacacatttatcgtctacctcgcatcaacggtggtgctgtttttctatgtgctttttgcaggagaagctttttacccgtattccgcccgcaactggatctgttttctcctattggccgttttgccaacgcttgccgggcactctgtttttagctgggttatcaaatggatcagtgcatcggttgtttctgtcgcgatcttatttgaaccggtaggcgcagccattttggcctatttgctttttggagaaaaaatttcctggttccaggcagttggcgggatcattattttgctgagcattgcctattttttggcccaggatcatgccgaacaccgccgcgctgtcaggctgaacgaaaaaagcgaaccggcccgttagcctcggaacgtttaagacttcgctgcacttgtgagcgttgaatcgctttaatatgcaccccatgataaaaggaagaaaataaaccacaagaaagtttcgtatataaaaatattataccgtgccgggtacttggcctacaaccgatacacttgcagcaactaacggctgttttggggatgacttgtgcccccctggatttgaccggtagacgattaaggccaatggatggctggcaaatgcaaggggggaaagggatcagtcataaagaaaaaaaaatccgcgtggcagatgccaagcataatcggggatttcaactttctttggaaaagggaggattgagaatgaacaagaaaaatcaaatttttttagcaatccttttaattttgagtgtggcaggtttcattgccaacatgatcgttggccctgctccccgctggattaaggcatacaatttgttagtagtccttgcctggggtgtgtggatttttcgcacaggaaaagaaaaaggccgttattggtaaacctgaattcgttacgattaacaaacgttgatcctatatgggtggtcatgatgctatcttaagagcctttgccaaaatgctatatctcctggcatccgtgactggatgatcagcgcaattttaagaggcctctctttttttcgctacggggaaatctgtaaattcaccacagcaatgtaaacgaatgcgaaatcaattgagggtcaggggggattgcggggaaaaggaggtgggatcgggatcatcgtaagaaggattcatcctcctcaatagaagttttccccatcaaaaaagagcccctggaaaaagatataaaacttttgtcaagaaacaatcctgtttttggattgaatagtgtttattacattgataaaatctttgatcgtttccttccaagtaacggtgtttaaatgtgcctgtgcgttcttaaccgtttccgcgatatgccctggatggctgatcgcattttggaaggtttggaaaagactttgctcatcaagatgacaaaataaagcacaattctctggcatgaagcttcggcccgtaccttcatagaaatcgataaccggcaaaccgctgctcatcatttcatagggcacaagagaaaaattggtcatcgatggtgcaatgccaaaatccgatttgagatacagctcgtgcaattcttttttcgtcagctggccaagattcttaccgttgataaattgcgcggattgatcggtaccgaaatagacaatatccagctgatatccgtgtttttggcaaagcttaagaaaattattgagaacgatctgaatagtgattggtgctcttcgtggactgtcccattttgtatagactgcaattctgaattccttttttttcttataatccaggaagtttctcgggtggaagggatattgttccatgtcaaccggaaaacggatcacatcaagcggactttgcacccggcattctttttcaatcatctcggcacaccaaggtccgagcgaaaccatatgtaatcctaattcataggtcttcttcgcaagataataccgatcgccaaatgggtaaaaataaggttcataatcctgaacaaaatacatcttgtatccgggtttgtctttaaaaacataaaccgattcccagagtgtccctatccaaatatctgactgatgggtcttcaatgcgctcacatcaagacaggtaccctgatacccggcgtaattaaactcagcgtttatctccatcgctttccgcggttgggaaaaataacttaaatagtaaacctggaaaccaagtttgctgagttccgtacctaaatgcagcatcgtcgtctgtccgccgtcataaggaataatcccggttgtgacaaaggtaatcgacttcggccggtgcggcaacgcttgttttacttgtttgaaattaaaatactggataatatcatcatatacatggatgtctcccatcgaaacaggtggaaacggtgtggcaataggttgtttattgcaaaattaaagtgcagagatgtgcaaaatttctatgcaaatggttatgcagaggggctttacatggaggggtagccatgataacctgtttgggtttgccaaatctgttacagctggccgcttggcaaaagaatcatggctgcagaggctccatgtcaagcccttaatagcgagaattcagattgaatttttatgcggtataaacgaatttatatactgcaatactctgcacttttttcttgcaaaaaacagcaataggtttcatgaacaatcactctcctagatggatccatagtttttatctatatatatctcaacttatataccacttttttccgtaccataaacctatatttccgagaggtcgtgcggtttactttgaaataagtaaaaacaccgcatattttataagaaatctgaaataggaagaaacattcagtaaaaataggcattatattgggaggattatttgttttccggctgccaagcataggaggagcaaataaccctttttaaagtatccgccaaaataaacgtcaaaacctcttgcaatagcggcatggctgcggacgaaatatctccataaatgcttagctagtaaaggattgcttggtcgacgattacagttatttctgttctttgtagtgcagcatgcgtggggacagcaggaactggatgtgcagcctgtatatacctagcagctggagcatccggtggtactattggttggtcctgtaggcaaggctcttggtattaaaaaacattaaaactgaaaccggcatccggtttcagtttttcttagcaacaatagtcatggtaaatgacaatgtaataatgatgaaactgattaacaaaataattaagttgcttatctgtacttttagtgtgaattggcttaatataaaaaatactatcaaatagagaaggatgaaaaagtaagtgtagtttatggtttttcttttaatgaattttgctctctcatcgtgtttatttatatgaggatatacataccacacattaaatgagagaacagaaagcgacaacgttaataaagcgttaaaatttaagccatattttgttttgaaagacaagattaagagtcctatcgtgacgatgagaaaaaagaaactacatataagtaacatttttcgattagacatttataactcctccttttcattaagtgtaaaaatatcctccactttcatattaaaaatcttagcaatttttaatgccaatggcagggaagggttatatttacctttttcaatggaaataatggtttgtctcgacacgtttagttctttggccaacttttcttgagaatacccaaattcagaccgtatttcaggtaggttatttttcaaacgtaggcatctcctttcaaaaggtaaagcatacttaacgtaaagtctcctttactgtcaaatacattatacatttttaaataaaatatgcaactgttattttaaagggtgtgtgcactgtatggatctgattgaaccaggagctcattctggagtttgattcaatgtgaaaaccgtctatggaggctaggggaaagcagagatcggttaatcccaacaatccggggagaaaaagttattatcctcttcttgtgtttgaagggaagtcacgtctttgtttaatctcaaggggtactcggttttgcagaagagacctatcagttgctttctccctattaccattcgttatgctctttttgacaaaggggttggggagatgatttctacagttagtgggaaaactgtaggattggttataccgtaaacggaggtggacttcaaaacctaaaaacgatgattcatcgtgaatccgctatgttgacgacgaattgaccgtgttggacggaaaggctgtatatgatcaggtgaatttctggaagaagcccccaagaaggttttggccattcgtaatgccaaagtatgagaaaaatcagcttcaagttgtgatcctctctggaaatttgaagcaattgtcacaaggatggactgggaacttctataccagagggcttgcgtggaaaacgacatcaaaccgtcaaaatatggattctcgatggataagatttcaacgcaagaacaagccgtaaaaacgagaaaagtttgcacacatggtcattttatcgtctgtctcaattcagtgaatataaagcaaaatgagttggattaaggctgaacatgttaatcctgtctatataagttaaacctgctctcgaattgttccgagagaaataaggcaaatgaccgtaaatatgattgcaaatgcaactccggaaacacagagatttagttggtgcaatgaatattcgatatgcgcctgtagttggtggtaatagccaatcagcctaagatgctatacgcgctgtcataggaagggtaatgagttgaagggtgtcaaacagaaatggactgcgaacgcttagccattttaagcattccactcgtcacatcataaaatgtagggattgcggctttagtcatgggaatctcaaaaaataggctgaatcttattattttttgtccgtccggttttcgcaataaagccgcaatgtatgtttgtcctgtcttattttgtagaaggaactggaggtggccggtttcaaatttaccaacgaatttcaaaaaaactattgcacaaatgctcacgacatgatatattaatactcgtccgatagcgaacaagcaacataacgttgacaagctatccggcatttgatataatagaaaagtcgcagtcataaagatgcgacacagattgttccttgaaaactggacaaaacgaaacgtcaaattctttttgagcttttatcaaacatctttactgagagtttgatcctggctcaggacgaacgctggcggcgtgcctaatacatgcaagtcgtgcggaccttttaaaaggttagcggcggacgggtgagtaacacgtgggcaacctgcctgtaagactgggataacgccgggaaaccggggctaataccagatagttttttcctccgcaattttggcagaggctcttaaggaggtcgcttataaaaaataattttgtactagttcttcttttcggactacagcttagtaaaaaagaggtgtaacatctatggtgaatgaaaacgtaagttctttaaaaatgccttctccccgcggaagttctaagggactttggctaggtggtgttgcctttacttttgcgattgcggcaattggatttgcgctagcggcaataccagggcttgatcatttagggcctctcgcatgcgcgattttgatcgcagtcgtgtatcggcaaattttcggatatccagaattgattcggtccggcattcaattttctgcgaaacgtttattaagatttgccattatcctatttggcttaaagcttaatattgatgtcgtgatccatcaaggattaggtcttctcgtccgtgatgttgctgtcattgttttttctatttttgtgacggttgggcttggaaaattattaaaagccaattcatccttaacattattgctcggaattggaacaggtgtatgcggagcggccgctattgctgctgtttctccgattttaaaagctaaagatgatgatacagccatatctgcagggattatcgcgcttgttggcactattttttctataacttatacgattattcggccatttttgcccggttcagatttgcattacggaatttggagtggaattagtttgcacgaaattgcgcacgtcgctttagctggcgctccggcaggacaagatgcgttagctattgccttgttggcaaagttaggaagagttcttttgctagtaccgctcagttttatattgatgtattggatgagccggaaaaatgctggtcggggatccgaagatacaaaagtggagtttccttggtttttgattggctttattcttatgagtttgtttggtagctacgttctcgggaaatccattcctatttcaaaaagtgcattaaacagcatttcttatttcacatcatttattttgacatcagcaatggtcggccttggattgaatattagtcttagcgatttacgaacaaaagctttacgtccattaattgctatgtcaattacatctgttttattatcttttctatcttttttcatcgcttaactatgcggaaagatagaaaagtttaaggtggaccccatcgtcaagacacaaatttaaaatttttaaggtgggtcagaatctgaaaaacagatactgactaatagagcgtgaggatgctcattggaggcagttagtggacagttcacattttttggagtgattcatcctgctttatttttccttctccgggggtgttgtgtcaagggcgagtgtagcgagggctttgccgaacccttgacacaacacccccggagaagtatcctctacccgaaggatgaatcactcaaaggccataaacggaggcaggagtcttatagcccagggcctgatgtggcgctgtacagcctttcggttgatgaccaaaccttcggcattcagtaaagcagcaatgcgcctggagccgtaatagggatgtttggtgtagatttcatcaatccgatgtttgataaacaattcttcaggagacggcccgactggcttgtagtacaggcttgaacggttcaggctcaaaagatcggcctggatggaaattggcagttttgcttcgtcatcccagtcgaccatttcaactcgttctgctctactccttaattccagatttttttttaagccacgacaactgcgtggttaggcggccgacttccgcatagagactttcaatggtctgttcatactcggctttcattttttcaacttttttgttgcctttttcaaagacttttggcatctgttcaagaaaagcatttctccattggcgaatttgattcacatggattccatgagcagaagcaatttcgttcatcgttttttcttcttttaagacctctagcacgacttgagttttaaattcaggcgtataactttttctcataaacctactttaacagctcctcattttgtgtctagttttatgggtccattatattggttcaggaattgttggggcggcaggcgcgtttcttttagtgcctattatgcttgttgtgctaaaaattccaacaagaatgacgattgcctcccaatgtcgaaatgagtatgtgatcaaacaaactctcacgactggaggaatactccttatacctattgtaggacggattcggaggagtaaggataggaggaaatggggggagagcgggggacagagctatcttttaaaggtagaaatgatcatttagggagaacgctatttaaagttgataagatctcattcttacgtaaaatatccaagaaaatctctgtagccttcgttttaaactgtgtagcctgtgtaattaagaaaaatttacgtgagaagggagtgccatttaatttaagtatttttaatgtaccaagagagagttcttttctaatcgcccaatacgatagtaaggtaattcctaatcctgcttctactgattctttaataatttgagtgctgccaaactccatgatgttatggggatgaaattcaaattttgagaacaagttttctacagcttctcgtgttccagaacctacttctcgtacaatccacgtttcttcccttaattgtgatagctttacgtctttttgattggcataacgatgattggcagaaacaatgatgaacataaaatcttcggcaaatggttccatatacagatcctcatgtttaaactcaccttctacaattccaacatctaattgatgactagctaccaattcttcaatttcttttgtgttggctatcgtaatagtgggcctgatcaatggatacttttcatgtatatgtgcaatgatatgaggaagaatatattcaccataagtgtagctcgctcctatccgtaaatccccactcggcttattcattacatcatctactaaatattgcatatgtgtatagagtcccagtattttttttgcatgatgatatacaatttcccctgctttatttaatcgtacatatttgttagttcgttccaaaagtctcgtcccgagtgtttgttcgaggttttggatgtattgactaactgcaggttgcgtcatatgtagttcttctgcggcacgtgtgaagttttctttttcggctacagtaacaaagacaagtaacaattgatccattttaacttcctcctttatcataagtaatttattacttatggatttaagtcaatattttggacaccaataagtgaaatttaattttgatctcatgccatatttttagtaggacgttgccgggccataatacggaggattagctcagctgggagagcgtctgccttacaagcagagggtcggcggttcgatcccgtcatcctccatttttatgccatcccggttcaggggcaaccggctttctatcggaagttcggggatactgccttgtgaccggcaccatacttgcgggaatcctgaaagaaaatagatatgtacatatttaacccaatatagtataattttctttgtgacaagtaatgtcgttatcggaatatgagccattagctcagttggtagagcatctgacttttaatcagagggtcgcaggttcgaatcctgcatggctcaccatttatcttatccgcgggtgtggcggaattggcagacgcaccagacttaggatctggcgccgcaaggcgtgggggttcgactcccttcacccgcactgtttagcacgatatgcggaagtagttcagtggtagaacatcaccttgccaaggtgggggtcgcgggttcgaatcccgtcttccgcttcattttatcccgccggggtggcggaattggcagacgcacaggacttaaaatcctgcggtaggtgactaccgtaccggttcgactccggtcctcggcatcagtaccatgacaaatgcgcccatagctcaattggatagagcgtttgactacggatcaaaaggttaggggttcgactcctcttgggcgcgcttattcctctttcgggaagtagctcagcttggcagagcacatggttagggaccatggggtcgcaggttcaaatcctgtcttcccgaccatgaagatgatcatagtggggccttagctcagctgggagagcgcctgctttgcacgcaggaggtcagcggttcgatcccgctaggctccaccaaacaggtcaaataacggcggcgtagctcagctggctagagcgtacggttcatacccgtgaggtcgggggttcgatcccctccgccgctatatttcgtatatcggacctttagctcagctggttagagcagacggctcataaccgtccggtcgtaggttcgagtcctacaaggtccaccattttttattttttgcttatcatacggaggaatacccaagtctggctgaagggatcggtcttgaaaaccgacaggcgggttacaccgcgcgggggttcgaatccctcttcctccgccatttcattatttatcatcgcggggtggagcagtctggtagctcgtcgggctcataacccgaaggtcgcaggttcaaatcctgcccccgcaattggtcccgtggtgtagcggttatcacgcctgcctgtcacgcaggagatcgcgggttcgattcccgtcgggaccgcttgttttggctcggtagctcagtcggtagagcaaaggactgaaaatccttgtgtcggcggttcgattccgtcccgagccaccattggttttcaatgaaaaatatatggcggttgtggcgaagtggttaacgcaccggattgtggctccggcattcatgggttcgattcccatcatccgccctttgatgcgggtgtagtttagtggtaaaaccacagccttccaagctgttgtcgtgggttcgattcccatcacccgctccactttgggcctatagctcagctggttagagcgcacgcctgataagcgtgaggtcgatggttcaagtccatttaggcccatctattccgcagtagctcagtggtagagcaatcggctgttaaccgatcggtcgtaggttcgaatcctacctgcggagccatatggagaagtactcaagtggctgaagaggcgcccctgctaagggtgtaggtcgcgattagcggcgcgagggttcaaatccctccttctccgccatttctggcccgttggtcaagcggttaagacaccgccctttcacggcggtaacacgggttcgaatcccgtacgggtcatactggtcacgaagctgttccgaaaactgccggagcagcttttttttttgcgtgttttttcacttctgcaaacctctttgcatcccgccagaggttccgggccccggtgcgggaaaagcgcaaaaaaacggcggagtgcaacactccgccgttttttcaaataaaatggtcaattaaaaaactgatggataatagcaaaccaaaaatcgtgtttgtctgtgcggttgctttcatggcaggcagcatttgcaacggttcactttttccaataaagcctttaatggcccggaccggcttcggtgtgctgacaaaaacgagcagtacccacggggttacaacaccgaacaaaacgaggccagccatccagaggtaggaaagggcaaacatcacggccagaagcaggatggcccctttccggccgagcagaatggcaatcgtttttctgccatttgctttatcgccgtccagatcgcggatattgttcgacagcataatagcgccgattaaaatcataatcggaatcgaaacaaatacaatcggccatgtgatcgtttttgtttggataaaaaacgatattaatataatgattacacccataaaaaagccggaaatcagttcgccgagcggcgtcgatgaaattggaaaaggccctgcagtataaagatacgcaacaagcatgcagacagagccgattacagcaatccaccaggaactttgcgagcaaatataaacgccgatcagcatggctgcgccgaaaaaagcaaaggcgaggtggagcaccgttttcggtttgatgccgtttctgacgattgccccgccgatcccgacggagtgctcggtatcaaggccgcgtttgtaatcgtaatattcattaaacatattggttgctgcctgaatcaacagggttgcaaccagcattgcagcaaacagcagcagattgatgcgggcaatgcctaaagccagtactgtcccgaggatgacaggaacaaaaccggccgttaaggtatggggccgtgtcaattgccaccagatccgccagcctttgtcagggccgattgctggagaagattgcgcattcatcttcttactctccttttatgctattcttatagaaatatggcgaaattagtacatttaaagtttagggaaatcaggcccatgtgtcaatgtatttggttgacaatcttattttaagccgttttgctgaatttaaccggcaaattttatataatagatgaggtatgttcataaaaatgttaagttttcatacgaaaactgtgatagatggaccggcaaaaagcaagagaggtttggaggagatcttttggctaatgaggatatattaatgaaagaaaaaacggcgccggcattaaaactggtaagcaaagtcataaaatgccgcactgcaccggatccgctccgcctttttacagcgggtgccgcacgtttttacggcagccggtttttttggcaggataagaatcgcgaaactgtatttgtcggttttggccgcgtctggtcctgtacggtcacagcctctgacggttttgcccaaatggaagacgaatggcgaaatttgaagggggcgggcgaagtttatccggaaaccgcggaaaccggaacagggcctgtgcttttcggcggttttgcgtttgacgggacggttgccaagcaggagtggaaaacatttggccaaggcattttccgcgtgccgcagattcttttcacgtttaaaaaagatgccgtctttcttacggtaaacggatgcggcggaacagagagcgtgcaggaagcggagaaaactgcacgaagccttttaaacggcagtacagctttccctgcacttccgcctttaaaagctgtacaggaaatgggtgcggacgaatggaaaaaaagtgtcgcaacagccgtgcagttcatccgggaagggagaatggacaaagttgtcctggcaagaaaactggagcttgcttttgacggcgtgacgagcccggatgcggtgcttgcggcgctttccgcccagcaaaatgacagctacttatttgtactggaagaaggcagtgaaagttttatcggggcttcgccggaaaggctggtaaaaaaaacgggccggcatattttatcgacgtgccttgccggttcgatcaaacgcggccgcaatgaggcggaggatttggaacttggaaaagcgctgctttcggatcagaaaaatttaagtgagcatggttttgtcgtatccatgattcggcaggtgcttgaacctttttgcaacgggctgaatgtgccgggtgcgcctgttttaatgcggatgcgcgatatccagcatctgtacaccccggttaccgggacagtgaaagacaagaacaccaccctttttcagttggtcaaggcgctccatccgacgccggcacttggcggtattccgcggcagccggccatggaagcgatccggcttcttgaaaaaatggaccgcggtttatacggcgcgccgatcggctgggtggattacaggggaagcggcgaattttgcgtcggcatccgctccgggctgttaaagggggaccatgcatccctttatgccggatgcggtgtcgttaaggaatcggaacctgaagaagaatataaagaaacaagcgtcaaatttaccccgatgctgcgcgcattaggaggcaaatagagtggaacaccaggagatcatgacaacttatttggcagcttttatccggcaattgtccgcgatggggatccgctatgcggtggtaagccccgggtcaaggtcgacgccgattgcgatgttgttagcagaacacccggattttcaaatttacatggatattgatgaacggtcagccgctttttttgcgctcgggcttgcaaaagaaaaacgcaaaccggttgtgcttttatgcacgtctggcacggctgccgccaactattatccggcggttgcggaagccaatatttcacgcgtgccgctcattgtgctgacggcagaccggccgcatgaactacgcaatgtcggtgccccgcaagccattgaccagatccgtctgtacggcacccatgtcaagtggtttgaggaaatgccgcttccggaagcaggggaagaagtgcttcaatttgtccggcagacggcggccagggcagtagtaacgtctcttcagcagccggcgggccccgtgcatcttaattttccgttgcgcgagccgcttgttccggttcttaagccgtctccttttgccagcgaagtaccggtagcggcaattgaaaatttttccggcaccctgcagctttcagaagaaacggttgaaatcgcggcaaaagagatccgggaaaaggaccggggcctgatcatttgtgggccgatggatattcctggctttgcggaggcggttgtggcgctcagcgaaaaaacgggttacccggtgctggcagatccgttgtcacaactgcggagcggccggcacgggaaagaaaggatcattgaaaattatgattccttgctgaaagatccgaaatggtccggccgccttgcaccggatgttgtgattcgtttcggcgccatgccggtttccaaaccgctgacccttctgctgaaaaaagtgaaaacagccgcccattatattgttgatggcggaaacggctggagagatcccgtgaagcggggaacaacggttgtttattcggatgaaattgagttttgtaaaaaattatcaaatgcaattgtgatgaacccgttttcggaatggtttgccatgtggcgaaaattgaatcagcaagcgcggcagattgttacagcttcgctggaggcggaagaaacctttgatgaaggaaaaacggtaaccgaacttgctgctgctttgccggatggcagcacgctttttgtcggcaacagcatgccaatccgggatgtcgacacatttttccaggcaacagataaaaagatccggattctggcaaaccgtggcgcgaacggcattgacggcgttgtgtctagtgcggccggcgttagcgcgggatgcggcaaagcctttttgctgatcggcgacttgtcctttttccatgatttaaacggcctgttgatgacgaagatgcacaagctcaatctttgtgtgattttgatcaacaataacggcgggggcattttttctttcctaccccaggcggatgagccggaaaaatttgagcagctgttcggcacgccgacggacctcgcatttgaatatgcggttaaaatgtatggcgggagctacgtccagcctcaaaactgggatcaatttcgggcggcgctttttgcttataaaggcgggctgcaggtgattgaagtccggacaaaccgggcgaaaaatgtcgaaagccaccggaaaatctggttacaggtttcccgggaaatggaacggtattttcaaggtgagcaacaatgagaattaacggattagaataccatgtagaaacggctggtgacaaggaaccgttgctgctgcttcatggttttacaggaaatgggaatacctggaatgatacggttgcgatgctgcgggacgaattccgctgcattgtggtggatatcatcggccacggcaaaaccgaaaaaccggatgatcccggccgctatgacattacaaaagctgccgctgatttgcgtgcggtgcttcaggcgcttggcatccgccgggcgtctgtcctcggctattcgatgggcgggcggctggcgcttacgtttgccgtccggtatccgcaaatggtagataaacttgtactggaaagcgcgtctcccggcttgaaaacggaagcggaacggctggcgcggcgagagcgggatgaacagctggcggaacggattttggccgggggcattgaagcatttgtcagccattgggaaaatctcccgctgtttgcatcacagaaacagttgccggctggggtgcgggggaaaatccgcaaacagcgccttgaaaatgacccggctggtttggcgaacagcctgcgcggcatggggacaggcgcgcagccatcatggtggggaagactctctgaacttcatttccccgtcttgcttgcaactggcgaatgggatgccaagttttgccagattgccggagagatggaagagcggctcccgaatgccaaaaaaattatttttccgcatgccggccatgcaattcatgtggaagatccgaaaaagtttggtacaatggtaaagggatttttaaaaaattgttgataaattgtcgtaaaatgtacataaaaaaggaggaatcatcatggcagttgaatggaaaactgagcatgagtatgaagatattttatatgaatcctataatggcattgccaaaattacgattaaccgtccccatgtgcgcaatgctttccggccggaaacggtaaccgagatgtatgatgcgttttcacgggcgcgcgatgatgccaatatcggggtcattattttaaccggtatgggggaaaaggccttttgttccggcggcgaccaaaaagtgcgcggcaatggcggctatgtgggcagcgacaatattccgcgtctgaacgtgcttgatttgcagcgtttgatccgtgtgattccgaaaccggtcattgccatggtagcaggttatgcgatcggcggcgggcatgtgctgcatgtggtttgtgatttgacgattgcggccgacaatgccattttcggccagaccggaccgaaagttggcagcttcgacggcggttacggcgcaggttaccttgcaaggatcgtcggccataaaaaagcgcgcgaaatctggtatttgtgccgccagtacaacgcgcaggaagcgttggaaatggggcttgtcaacgcagtcgtgccttatgaaaaactggaagaagaaacgatcaaatgggcggaggaaatccttgagaaaagcccaatggcgatccgtttcctgaaagccgcattcaatgctgatacggacgggcttgccggcctccagcaatttgcgggcgatgcaacccttttgtattacacaacggacgaagcaaaagaaggccgcgatgcattcaaggaaaaacgcaaaccagacttcggccagttcccgcgtttcccgtgattggaaaatgggctgtctcaactgaggcagcctgaatttttttcggaagcccggcagttcccgctatgggccaagaaaaaccccaattgttgaaactgggcggggaaaagctgcataaaccggttggagcacccaatcagacaaaagggcggttaatcccctgtgaattgtccaattggagcctccaattggacaaaatggcgtgcctccaccgggaaactgatccatcagcccgtctaaatagacaaaagagcgggagggggtgcgcgaattgtccgattggagggcccattcagataatccgcagacacatcccgccagctgtcccgttgcccaatctttgcaaacttgattcaaagatctaaaacccatttattcaggtgatgttatgctacccaattttttaaaacagcgcgcatatttaacgccgaaccggattgcgctcgtcagtcaaggcgaaagtctgacgtttgccgggctgtacgagaaggcgaaagaattggcgcggaagctgtccggctgcggcatgcaggcggaagatacggcagcggtccttttaaacagtcgcgcggaaacggtagccattctccatgcgctgcagcagctccgtgtccgcaccctttttctcaaccaccgtttaacgacggcggaaatgcagtaccagctcaccgacagcggcgcgaaatggctgattacagaaaaagcgttccgagaaaaaacagaagtgttaaacgaaacagcaaccgtgattcaaagcgaagcacttggcgatttgccggctgcgggctacgaagaacgtgcggagtttgcactcggggatgtctgctcgatcatgtacacatccggcacaactggcaaaccaaaaggcgtcctgcaaacatacggcaaccactggtggagcgccgccggttctgcgctcaatctcggcgtgcgggaagacgatacgtggctgtgcgcagtgccgctttttcatatcagcggtttttcgatcctgatgcgttctgttttttatggcatgacggtttatttaatggaaaaatttgatgaaaaagagacggccaaactgctgaagtccggccgcattacaacgatgtcggttgtggccaacatgctgcagcgtttgcttcgtgaactcggacacgacagccttcatccgaacttccgctgcctcctgctcggcggggggccggcgccgcgcccgctgcttgaagcgtgtgccgaaaagaatatcccggtttttcagtcatacggcatgaccgaaacggcctcgcaaaccgtgacgcttgccccggaagacagtctgcgaaaaatcgggtcggcggggaaaccgttattcccggcgcaaattcggattgtttccgatggcaaagtgtgcgggccgtttgaacacggggaaattgcggtaaaagggccgaacgtgacaatcggttatctgaaccgcccggatgcgaaccggaaaagtttccgggaaggctggtttttcaccggcgatatcggttatctggatgatgaaggctttttatacgtactggacaggcgctccgatctgatcatctccggcggcgaaaatatctatccggctgaaattgaagaggtgctccttgcccatccggatattcttgaagccggggtcatcggcgtggaggacgaaaagtggggccaggtgccggctgcgtttattgtcacaaaaagggcagtccgggagagggagctgcaggctttttgcgaaacgcggctcgcaaaatttaaaattccgaaaaaagtgtatgccgttcccgcgctgcctcggaatgcatcgaataagctggtgcgcaggaagctgctggagctgctgccgtcatgatcgggattgaaaaagtatcgctttctgtgatcaaaatgccgcttaagtccccgtttgaaaatgcgctcgaaaaagtaacggagcgggaagcaatcctgcttgaagtattagataaggaaggggtggccggtttcggggaagctgttgcattttcaaccccgtggtacacagaagagacggtgcagacatgctttcacatgctgaaagatgtgctcgtcccgcttcttcgggaaaagccggttgcacacccaaaagaagtgagcggccggttccggtccgtccggcgcaatcatatggcaaaggcggcaatcgaaacggctatctgggatttgtatgcgaaaaagaagcaaaagccgctttggcggttaatcgggggcgcacgggaccgcgtggatgccggcgttgcggtcggcagccatgatacagcggatgcgctccggcaaatcggggcgtttgttgatgagggctataaaagggtgaaagtcaaaatcaagcccggccatgatgaagcgtttgtccgcgaaatccgggatgcatttcctgatctcacgctgatggcggatgcgaactccacgtacacgctggcggatgcgccgcgtttgaaaaggctcgaccggtacgggctcctgatgattgaacagccgcttgccgccgatgatattgtggagcacgcggcattgcaaaagcagctggagacgccggtttgtctggatgaaagcatcgtaacatatcatgatgcggaaagcgcgctccggctcggcagcttccgggcgctcaatattaaaattgggcgggtcggcgggctctatccggcgatccggctccatgacctttgtgcatcccgtggcattccggtctggtgcggcggcatgatcgaatttggcgtatcgcgcgcctttaacctcgcgctcgcctctttgccgggctttacgattccgggcgatatttcttcatccagccggttttgggaaaaagatatcattgaaccggaaatcacggcggaaaacgggcaaatccgcctgccggacagaccgggaaccgggtttgagatcgaccgcgcctatgtaaaaaaaatccggacatataccgaaacgatatgaaaaaactgccgcacaagacggcagttttttcgtgaaaacatcgattcgaatgtcttataagtgcctttacggctggacgttcgagatcttttcatgaagacattcgattcaaatgactgataagtgaaattggcctttacaggtgaacgcttggtttttttttataaaacatcgattttgaaaatgaaatcagcccacacggctggaagctcgaggttttttcattcaagtgtcttatcagtgaaatggcccttcatgccaggtttcatgaaaacatcgattcaaacgttttacaatcggtttcctgctggttttcagcccgggttcctgtatggctcacgatgtaaatttcctcggcagaacaaagattgccctcctcccagaacacacagttcctgacttcgcataacacatcttttgccatgcgggacacccccttaaaacatgccgtacgcttttagtttctgcagcgtgcggcaaaccattactgcaaagctttttccaattcttttaaattgtcgtccatcaatgtaaagtaatctttatgcgctttgatttcttcgttcgtccggacgccgagatggtggatgtaaaccgcttttgtattcgtttcctgttggaccactttcgcaattttggaaggcacatttttttcaaacacgatgtaggaaatatggtcctgttttactttttggataatgttctccagctgtttttgcgacggttcatccgaagtggaaagcccggcgatcggaatttgtttgatgccgtaccgttttacccagtagccgtatgctgcgtgggaaacgacaacttctttgttgtctgactttaataccgcctgtttgtatgctgcattgacccggtccagtttctttgccagctgatcgtaatttttcttaaaatacgctttttgctccggcattttttttgaaagctgtgttgtaatcatgccggccatttgcttgacgtaaatggggtcgagccagacatgcggatcggcttttgcatttgttttatccggaacaggaagccggtctccgagtgccatcattttcacattctggccttcgagcacttgttttgccttgctcgcaaagccttcaagcccgagcccgatgtaaaagaaaaagtcggaatcggcgagcttcaggatatctttctgtgacggttcgtatgtatgttcatccgtgcccggcggataaatcgtttttaccgtcacatactttccgccaatttgctgtgtaacatattccagtggatagacggtggtataaaccgaaattttatgatcctgcttgctttcctgtttgtttgtacatgccgtaacaaacagcatggtaaaagcgagtagtacgggaaaaagttttttcaaagcggacgattcctttctttgtttaattcgtaatgattacgatttactcacaaaaaatatattactaaaatccgctttatatggcaagaaaaatttttaagggacagcaaatgctgccccttaatcttttttatcttcttcttcttcggtttcaagcatgccgtaagcgccgttcatggtctgttcgtgggggtcagcgccgaaatcgtcgccctttttttgctgctcttttttctcttccatacaaaacgcctccacctgtagcgttttcccgaaatgggaaacgtatacggggggaggcttgcggtttgaatgcaaaatggtttgttttttcaccggcccggaggaattaaccagacgttcaatgttttttcaccggccactggtccggaacgggatcatacccgccggcgtggaatgggtggcattttaaaattcttctgattgccaggtagccgccgcggagtgcgccgaaccgtttgaccgcttcaagcccgtaattcgagcaggtcggctgaaaccggcagcttggcggaaacagcggggaaatcgcaagttgatacaaacggatcagtttaatgaaaatgaacttcagcatcgatctgcccctttcttcgtttattttagcatgttttcaaaaaagatgtgcaacatatgattggatgtttgaaggcccggaaaaagggtacaaacaaagcaggaggttgatcaaacatggcagaaaacgaacaattaaaggaaatcttaaataagcaggttgccaattggacagtactttataccaaattgcacaactaccattggtatgtgaaagggccgaactttttaagccttcacgccaaatttgaagaattgtacaatcttgcaaatgactatctcgatgaactggctgaacgtcttctcgctttaaacggcaatccggtggcgacattgaaaggaagccttgaattgtcctcggtacaggaagcaagcggcaatgagagcacagaggaaatggtgcaggcgactgccaacgactttgcgatgatcgcgaaagaactagaggaagcgatcgggctcgccaacagaattggcgatgacgcaaccgccgacatgcttaccaacatccaggaaacgcttgataaaaacatttggatgctgaacgcctttcttggaaagcggtaattaaaagcggggtgcgaaactggccggcccccgccataaaggctgtcccgccaaagcggaacagcctttattactgcaaatattttgttgtcgggtaagcgtcaaagcctgcgtaatcggaaaatttatctttcagtgtctccagtatgtataatccgataaaatgttccagttcggctgtgctcatttcgcgcacaatcccaagcaggtctttccggttgtaattttcgacgaccgctgcagaaatggcgtccaagtcttcttcatcccccgtcagccggtcccggtacagctcaaacaattcatcgactagcctcatgccgtctcctcctttatttatttcttattcactatccgcaatggggcctttttaaacattttatgattatttttacgcgatgtacctcgaaaaatacaagaggtttcaataaaaatttcgccaatttttgcacccgcttgcgtataatgaagaacaggagggatttgatgtgtaccggtttacagatttgaacggcaacccagttacacttatttttgaaaaaaatgctttttccatagagccgcagcatgtgctcgtgctcgcacgctaccgcggaaactggcttttgacaaggcatccgaagcgggggcttgagtttcccggcggaaaaagggaagcgggcgagacggtccgggaagcggctcgacgcgagctgtatgaagaaacgggcggtattccggaaaaccttcaatatatcggggagtattgcgtctgtgatcaggcgcgcgggccgtttgtaaaggcagttttttacgcgggcatcggccggcttgaacccaaacacgactatttggaaacggatgggcctgttgttgtggaagggaatcttgttgaaaaattgcagtccccgtcattcagttttctcatgaaagacggggttgtcgaaacagcgctcaggcatcttgaaaaataagaatggggggaaccctcatctgtcttttgccagctttttctccagccagccgacaagctggtacatcatggttgccacaatggcaatcaggatcatcgaaagcatgacgagcgtaaaattaaacacctggaaaccatagatgatcatgtagccgagcccttttgaagatacgagatactcgccgacaatgaccccgacccatgcaagcccgacattgactttcagcgtggaaatgatcacaggaatcgatgccgggaaaatggcttcccggaacacctgtaaacgggaggcgccgaacgagtgcagcactttcgtgtaattcgggtccacatcccggaacgccgtataaatgacgatggttgtcacaatgacggagataatgacgcccatggcaacaatagaagagaatcccgggcccatgctgacaattaaaatcggaccgagcgctactttcggcatggcgttaaggacgacgagatacggatcaagaatctttgataaaaacggcgaccaccaaagaacggcggcaagtgccgcgccgagcacagtcccgaggataaagcccatgatggtttcaaaaacggtaatccccaaatggacgtaaagcgagccgtcttccaactttgccaccaataacgcccacactttggacggggagctgaaaatgagcgggtcaatccaatggagacggctcgccagttcccaaaggcagaaaaagacaattaaaatgaaaagctggaaaaagcggacccggcgtttttctttgcgtatcgcggcaaggtaatcttcatgccggagcgttgtattttcagctgttttcaagggactccagctccttccatatgtcgttgaaaagttcggaataggtttgccggctccgcgcttcaaacgggcggaggcggcgcagctcttctggcacatcaaaaattttatggagcctgccgggttttgacgccaacagcaggatccggtcgctcatcgcaatggcttcgccgatatcgtgcgtgacaagcactgctgttttatggaattgcttcagcgtgtcaaataccaggtcctccagttttaatttcgtctgaaaatcaagggcggaaaacggttcatccagcagcaggattttcggatcgaccgcgagcgtccgcacaagtgccgcccgctgccgcattccccccgaaagttggcgcgggtattggttttcagtgccggcaaggccgatcgtttgcaataggcggagtgtatgttttcttgacgccggattcagccgtttttccaatttcagcccgatcatgatgttttcttcaatcgtcttccacggaaacaaatagtcctgctgaagcatatagccgatggaagattgccgggaacctggcaatttgccgtcaatccgcacaatccccgcagtcggttgcagaagccctgcaagaatcgaaagcagcgttgtttttccgcagccactcgggcccaaaagcgagacaaactcgccttcctccatttgaaacgaaatgttttcaagcgcctttgtggcctgtttagccgtaaaataggtgtgattgacgttttgaacggtcaaaaaacgcatatgtgctgcccgcctgaaggggcgcaccccctttccgttattttgcttttttcacaatggatgcgttgaccagtttgtcgtacggcacagtatggtcgagttcgccggcttctttcatgatgtcctggagcgtgttccagccgcttttggttaaaatcatatcgctgctaaacgagccctggctgcggtaccgttcaatagaggaggcgagcatatcggtattcgtgtctttaaaataaggatggactgtttttgcgaccgtttccgcatcggttttttgcacccattttccggccttcagcagggcgcggacaaatttcaccgctgttttttcatgttctttcaaatagctttgctttgccatgaaggtggtgtacggcactttgccggattctttgccgaaagaagccacaatataaccctttccttctttttccattgtggatgcggtcggttcaaacagctggacaaaatcccctgtgccggatgcataagcattggcgacattggcaaaatcgatgttttggatcagcttcgtgtctttgtgcgggtcaatgccgtgctttttcaggacatattcgccgaccatctgcggcattccgcctttcctttggccgagaaaagtggtgcctttcaacatatcccacgaaaaatggccgatttttttgcgcgagacgagaaatgttccgtctgtcgccgtcagctgcgcaaaattgataaccgggtctgcccctttttgtttgtatacgtagatggacgtttccgatccgacgagcgcaatatcggttccccctgaaagcagggcagtcatcgttttgtccccgccccatgtggtcgccagcttaatatcaagcccttcctctttgaaatagcctttcgcaagcgcgacataaagcggggtgtaaaagacggaacgcgtcacttcggcaacccgcactttttgcaatgcttttttctttgaacctttactcccgcacgcgcttaaactgaatgcaagcaatacggcaagcagaagcgtgaatccggatttgagccactttttcatcatgcaacctcctcattggacttttttacagcctatgccgcgtgagttgattgtgtgaacgcctaatcaattaaaaatctattttgccgggttgggggagaaaagataaaacgagaacggtgccggagaccagccggatcgggatgttgcgtttgaacctgttcctggctggggccgggaaagcacatttctgtccgcgatcgggggcaatattcaaaaaggctgcaccctttaaacagctaaaggggcagccttttttatgagcaggataccatcgcttgccgcgtgtccatggccagttgaaacgccggtccttcgcaaattttaaagcggaatggccgtgccattcatcctttattttttcgcccgttttgccgcacgcgcgtcagcccaggtgatgcagttggttagcggtttgccgcctttgtccactgcaatcaggctgtgcattgcggaactgaacgaaacgagttttatttcggaaggatcaacgccgcttttggcgatcgctgttttcatcgagtcaatgacagcgcggaaaatatcatccggatgctgctcggagacctggggggacgggctgtaaagcggatagcctgcatagtgcatgctgatgacttttcctttttcgccgaataaaacagattttgttgatgttgtaccgatatctacgcctaaataataggtcatcgaaagtcaatctcctatatgaacctgctgcttcaaaatagtttttacagttcagtgtttttttccaatacctttattttaactgaaaccgcacgggttttaaaagttttttggaaaaccgccggaatccgaattgcttgacaggcgccggctgtggccgacatactggcatagaaagtaaaaagtaaatggataaaagaggttacagccatgacgattgcagtgatttacggaagttcgcgcccgcgcggcaatacagagctgctcgcggaacgcgcagtggaaggcatgcatgtggagcgcttttatttaaaagatgcgcgtattcttccggtcgaagacaaacgccacacggattcagggttttcaaaagtggaggatgattatagcattctcatccagcatattttaatgtgcgatacgattatctttgcaacgccgatttactggtacgggatgtcggggctgatgaaaaacttcatcgatcgctggtcacaaacattgcgggatccgcagtttccggactttaaaaaaagaatgtcggagaaaaaaatttatgtgattgcagccggcggggatatgccgcgtgtcaaagggctgccgctgatccagcagtttgcatatattttcggctttttaggcatgcgttttgacggttacattcttggagagggcaataaacccggcgatattgtacatgataaagaggcaatctttgcagcggatcaattaaacgaaacactgaaaaggtgatgtaatttgaagaccgtgatcgaaaagcagctttttccgtccccgaatccgcatgtgcgcatgtatctggtgacatactggtcggacggcctgaaagtgaaagggttgctggcagagccggatgacgggcgcatttatgacgggtttttatatttgcgcggcggcatcaaaagcgtcggcatggtgcggcctgcaaggatcggcgagtttgcgtcggaagggtttatcgttttcgcgcctttttaccgcggcaaccggggcggggaaggcgatgaagactttggcggagatgatatgcatgatgcctattttggctttgacgtattgatggagcatgagcgggtaagcgggcgtgtccacgttttcggattttcccgcggcggcatcatggcactcggcaccgcgcaagcccggccggccgcgtctcttgtcacgtggggcggcgtttcggatgttgcgctttgttatgcggaacgggtcgatttgcgaaaaatgatgaagcgcgtgatcgggggcacgccggaaaaatatccagaacggtaccgggtgcggacgccgctgtataagctcgggcaaattggttgccccgttctcatcattcacggggagcaggatcaaaatgtgtccgtggaacacgccattcgtctcgaacgcgggctcaaacaacttggaaaaccggttgaaacatggtatttcccggagcttggccaccatttcccgccgcctgtaaaccggcgggttgtccatgatgccagcgtttggatgaaaaggcattccgcacatgatacaatagaagcaacgacggaggtgagccgaatgggaatgccgatggaactcgatacgatgctcgtgacgaacgggaaagaagagcgtattgagcaaaacctctttttgctgaagcaaccgggttactgcgtgtatccgcttgatacgccggttgaaatccggaaaaagaaggaacacgggccgagcggaagcgctgtcatccgcaaactggaatgggaaaacaatacaacgatcgttcattatgaactggtttctttgaacacgccgaattaaacaggcgccgcaccatgatccgcggcgcttgtttggtttatcaggacgggcggacgggaattttacaactgcaatgccgggctgattttgcggggaacgccggaattcagccaaagggcaatgcctggtgaacggaactggatcagcttgcgagtagcgcggagaaaaaacggatccggcggcggaatattggcagacgcaacacacgccttgcaagtgcgccgtcagcctggtttttcgggatgaaatgggcaagattgaaaatactaatcgtaagagaaaaggccggcttctgaagctggaaaaaggaacaggccgaagcgagtgaactacccaccacttannnnnnnnnnnnnnnnnnnnnnnnnnnnnnnnnnnnnnnnnnnnnnnnnnnnnnnnnnnnnnnnnnnnnnnnnnnnnnnnnnnnnnnnnnnnnnnnnnnntttcggaaagacgttaaaaagggccggcccaagcgtccgccacaatggaatacttgagggaaaaggggccggcttttgcatttgctaaaaaaaggaggaggaatgccaaagatggaaacgggctacaaaaaagcttgcggcgcatatgccgtcatttttgatgcgaaaaaagaaaaagtcggggtggtgccgtcgggcagcggctacaggctgccgggcggggaaatcagccgcggggagtctgaacttgcctgcctgatgcggacagtcggcgcggatcttgaaatcgcgggctttttaggtaaagcggcacaggaaacgggcgcgcggtccatggatgaaggcctgttttatttgggaaaatggggacagccccgcaaaggaagccataacctagaatggctcaaccttcacgaggctgcggaaaaaatggccggcgcccaccaccaatgggcagtgcaggaaggaatcagcgccgtccaggcaagtacctggttttagccgggctcccgcttatgcttaaataagcgggccgccgagtttttcaatatcatccggcactgatgaaaattgccggaaattttctttgaaccgggctgcaagttcgaacgctttttcacggtaagcccgcttgtccacccatgtatcttgcggataaaggactttctccggcaccccttcaatacgggccgggatgtgcagcccgaaaatattatcctgccgcgtttccacatttttcagtttgccgtttatcgcagcccggaccatggccctcgtatagcttaatttcatgcgggaaccggttccgtacgggccgcctgtccagccggtattgacaagaaatacctggacgttgtgcctgccaattttctctccgagcatttccgcataaacggcgggctcaagcggcaaaaacggcgcgccgaagcaagtggagaacacagcttccgggcgcgtgacgccgcgttcggtgccggccagtttggaagtgtaaccgctcaagaaatggtacatggcctgctcttttgtcagcctgctgatcggcggcaggacaccggacgcatcagccgtcagaaatataatggttgacggatggccggccatgccggaacgggcaatattgccgatgttttcaatcgggtaagcagcccttgtattttccgtcagtgcattgttgccatattgcggcctacgggacaccggatctacgactacattttcaagtacggtcccaaaccggattgcctggtaaatttgcggttctttttcttctgtaagcccgatgcactttgcatagcatccgccttcaatattgaagacgccgctgtcggaccagccgtgctcatcgtcccctataagcgcgcgctccggatcggcggaaagtgtcgttttcccggtcccggacaagccgaaaaacagggccgtatcgccgtttttcccggtattggcggagcagtgcatgggaaggatgcctttttgcggcagcaaataattcatgatggaaaaaatgctttttttcatttcgcctgcatattccgttccgccgatcagaatcatccggcgttcaagtgaaatcatgatgaacgcttcggaattcgtgccgtcaagcgccgggtctgctttaaacagcggcgcggaaagaatggtaaattgcgcatcgtgttgattgagttcctccgcatccggccggataaacaattgatgcgcgaataaattatgccaggcgaactcattcacggtctggatcggaaggcggctttttggatcggcacccgcaaaacctttaaacacaaaaatttcgtctttcccttttaaatgccggaccattttttcatagagcctgttgaacacgccgggagatactggctggttgattttgccccagtcgacacggtcttttgattgggagtcgacgacaataaatttatctttcggcgaccttcctgtgtattttcctgttgtagcagaaatggccccttccgttgtcagcacagcttctttccgttcaataattttttccattaattgcggcacggaaagctgcatgcgcacattttcccccgacaacaaaaactttaaatcgtcagaagcgccaatcagatccatttttataaaccgcccctttgaataacttatttcgctttaaacgatatcagtataacatattcatccgtttattacatacttttttccgggaaaaatgcagggggcaaaagggcaaatggtgaaaaaagcattgacagcgcctgctaaattgcgtatgattttactttgaacggatactcttatcccgagctggtggagggacgggcccgatgaaacccagcaacccgcctctggaacaggcaatgcgctcgcaacgcagctgccgcttgacttccaggcaaaggtgctaacctgcagcaaggaatgtttccttgaacgataagagtgaaaggcgcgattgattgaagtcaaaacctttccactcatatgaatgggaaaggtttttatttttggctttgtacttaaaatgaatcgagtttagggtatgagtaccgtttccaatatgtaaccatataaggaggaaaagcggatgttaaaaggacggcatttgttcacatcggaatcggtgacggaaggccatccggacaaaatttgcgaccagatttccgatgccattttggatgccattttagaaaaagacccgaatgcccgcgttgcctgcgaaacttccgtcacgacagggctcgtgctcgtcacgggggaaatttccaccaatacatatgtggatattccgaaagtggtgcgcaagaccattaaagagattggctatacgcgcgcgaaatacgggtttgatgcggaaacctgcgctgttttgacatcgattgacgaacagtccgaggatattgcgcgcggcgttaaccaggctttggaagcccgcgaaggcgggatgagcgatgaagagattgaggcaatcggagccggcgaccagggcctgatgttcgggtttgcctgcaatgagacagaagagctgatgccgcttcccatttcgcttgcccacaagcttgcccgccgtcttgctgaactccgcaaacatgaagtgatcccgtatttgcgcccggatgcgaagacacaggtgacagttgaatatgatgagaacaaccagcctgcccggattgatacaattgtcatttcaacgcagcataatcctgacatcagttccgggcaaattcagggggatatgaaaaaatacgtcattgaaccggttgtgccggcagacttactcgatgcggatacaaagtatttgattaatccgaccggccgctttgttatcggcggccctcaaggggatgccgggctgaccggccgcaaaatcattgtcgacacgtacggcggatatgcacgccacggcggcggcgcattttccgggaaagacccgacgaaagtggaccgttccgctgcttatgccgcccgctatgttgcgaaaaatattgttgcggccggccttgcggaaaaatgtgaggtacagcttgcgtatgcgatcggggtggcgaagcccgtttccatttccatcgatacgtttgggactggaaaagttccggaagaagtgctgatcgaggcggttgaagcccattttgacctgcgcccggccggcattatcaaaatgctcgacttgcgccgcccgatttacagacagaccgctgcgtacgggcatttcggccgcgatgatttggatgtgccttgggaaaaaacggacaaagccggggcgttgaatgaattcgcccgcaatcatatcggaaaataatgggaaaaagagcgtgcctgttgataggccgctctttttccatgcgggagatacatgtaccttttttaacaaaatccctgcaaactgccggaaaacatgctaaactatattacatgtgcagattttggccgtcaaattttggcggaaatcgatttgttttttcaagaaataaatttacaatagaagtatatcgaaatgattaaagtaggtgactttttacatgtgcggatttattggctgcgtccatgaccaacccgttacattatcagacgaagacaggcaacggtttaaacagatgaaccatatgatcgagcaccgtggcccggatgatgaaggcttttatgaagacgaacatatccagttcggtttcaggcgcctgagcattatcgacatcgaggcggggcaccagcctttaacatacgaaaacgaacggtactggatcatttttaatggcgaaatttataattatgttgaattgcgtgaagaattattaaaagaagggatggcattcgaaacgaattcggatacggaagtcatccttgccatgtacagccgttacggcgaaaaagcaatcgggcgcctgcgcgggatgttcggatttgcgatctgggataagcaggaacaaacgctgtgcggcgcgcgcgacccgttcggcattaaaccgtttttctattatgaagacggcgataaaatgtatttcggttccgaaaagaaaagcattttgcttgccatggaaaaaccggaactcaattatgatgctgtccaatactatttaacctatcaatttgtgccggaacctttcagcatgacgagtggcatccgaaaactcgaaccgggccattattttatgaaaaaaatcggcaaaccgatggaaatcaaacagttctggaaagcttccttccacccggtccataagagcgaggacgaatttgtaaaagaagtacgcgatgtgcttatcgattccgtaaaggtacatatgcgcagcgatgtaccggttggcgcgttcctgtcgggcgggatcgattcctcgattacggcatcgattgcaaaacagttccacccgggcattaaaacattctccgtcggattcgaacgcgatggctacagcgagatcgatgttgccaaagaaacggcggaaaaactcggtgttgaaaatatcagctatgtgatcacgccggaggaatatatgaaagaactgccaaaaattatttggcatatggacgatccgctcgcagatcctgcttgtgttcccctttattttgtggcgcgcgaagcaagaaagcatgtgaccgttgtcctgtccggcgaaggcgcggatgaattgttcggcggctataatatttaccgtgaaccgcagtcgcttgaagtttttgataaaattccggctgccggaaaatcaattttgaaggctttggcgaaagtgctgccggaaggggtaaaaggaaagagctttatcgaacgcggtgtcacgccaatggaagaccgttatatcggcaatgcgaaaatgtacacggaagaagaaaaacgcgacttgctgttgacttataacaacagccttgactaccgcgatatcacaaagccgctgtacgatgaaacgaaaggctacgacccggttgaccggatgcaatatatcgatatccatacgtggatgcgcggcgatattttgctgaaggcggaccggatgacgatggcccattcgcttgaactgcgtgtgccgtttttggataaagaagtgttccgggtcgcttcacaaattccggcgggcttaaaaacgtcccataacacaacgaagtatattttgcgaaaagcagtggaaggcatcgtgccggaccatgtgctgaaccggaaaaaactcgggttcccggttccgatccgccactggctgaaagatgaaatgcatgattgggcggtagagatcatcaaaacgagcccgacggacgatatcatcaacaaacaatatgtattaagactgctggaagaccattgtgcaggcaagctggattacagccggaaaatctggaccgtgctgattttcatgctctggcatgccgtgtatatggaagacaagtacggttttcaaaaaggagcacaagggcggcctgcgggtgcttctctgtaacagaaaaaaagggggtctggccccgcttccgtaatcaatcggaaacgggggcaggccctttatcgtataacgctttttttcgcacatgcccgcaagctttgcatcgcggcggtttttaaacccggttagcagtatgaccctgtttttatcatgcttttttcgcctgtttgcggcttaaagcaatgcggctgccggtgcccgccgttaacctttgtcagcgcccggcggcatttttatagtactgcgctttttcagcatactcacggacgatgcggcgcatatcctggatatctttttcggtaagcgcgcggatcacttttgccgggcggccgaatgcaagcgtatgcggcgggatctttttcccgggcgtgacaaggctgccggcgccaataaaagcgcctttcccgatttcggcgccgtcaaggatgattgaacccatgccgatcaaagcttttgtccggacatggcagctatgtaaaatcacctggtggccgaccgtcacttcatcttccagtatgagcggcgtttgcgggctttcgtgcaggacgcagttatcctggacattcactttttgcccgatttttaccggtgcgacatcgccgcggatgacggtcccgaaccagatgccggactggccgccgatttcaacgtcccccgtaatggccacattgtctgcgatataagcagtcggcgcaatcaaaggggtttttccattgtaagcatagatcatttcgtaccctcctatttttgatcttttcttttatcttaaagaattgggaacaaattgtgaataaatcgagttaaaaatggcatatgtttttcagaacagaaggattatgggtaaaataaaagcaggatggtttcgcaggttttgaaggaggcaggaacatgtggaaatgggaagcagatgaaaacccaaaagcagtcatcgttatggtccatggcgcgatggaacatcaccgccgctacagctggctgattgagatgtggagatcaagcggctatcatgtcgtgatgggcgatcttcccggccatgggatgacgtcgagagcaaaaagggggcatattgattcctttgatgaatatacaacagagataaaagagtgggtgacggcagcataccagttcgacctcccgatttttctcctcggccacagcatgggcgggctggcggtcatccggctgcttgagaaggaacatctgaaaattgcgggggttatgctttcctcgccgtgcctcgggcttgtccagtatccttcaaagctgctcggcctgctttcaatcgggttaaaccggattgccccaggcctccgctttaacagcccgctgaccgtgcaaatggcaacacggaataaggatattcaaatgcaggcggtcaacgattcattgatgctgacaaaagtgtctgtccgctggtaccgcgagctgctcgcagccatgcggcaggcacacatggataccgtgcggctgccggacgtcccgtttcttgtcatgcaggccggaagtgataaaattgtggacaagggagctgtcgtgaattggtttaaccaaacttccgtgtccgaaaaattatacaaagaatggccgaaatgctaccatgaaattttcaatgaaccggagagggaagatgttttcctttatgcgaaaaattttgtggaaaaccggctccgcgcgttaggctatatattagaatgaggtgacgcttgtgacaatcccatcctatccgatctcattaatggcgcaagtttaccgccgggtgatgccggctgtccaccatgaactccattactggcgggaaaaggcacgccggattcccaatgatgaattaaagacacaggcgctcgccagcattcagcataaaacgttccactgcgaaggcgggtcgattctcggccttttggcaatggaagagcggacagcggctttccggtttattgtcgcataccagacgatcagcgactatcttgataatttatgcgaccgcagcacatcgcttgacccggttgatttccgggcgctgcacgagtccatgtctgatgcgcttacggtcggcgcaccgttgaaaaattattaccggcacaggcaggaccaggatgacggcggttatttgcatgaactcgtgcggacatgccaggttgtgttgagccgcatcccccaatataaagccattcagccttatttgctggaactttgccgttattattcggatctgcaggtacataaacatgtgcgcgtagaggaacgggtgccgcggctaaaggaatggtttttgcactacaaggcggattttccggatatggaatggtatgaattttccgcctgttccggctcgaccctcgggattttctgccttgtttcctatgcgctccgggatgatttccgccctgaatatgcgaaaattatccgtgacgggtattttccttatattcaggggctgcatattttgctggattattttatcgaccaggacgaagacaaaaaaggcggggatttgaatttttgtttttattacccgggagaagaagagctgtttaagcggctgaagcatttcttgcaggaggcggataaacatacggcccggcttccgaatgaaaaattccataagctgattaaccgggggcttttggctgtttatttgtcagatgaaaaggtgaggaagcagcggagcgttcagaaattgtcgcggaaaatgatcaaatttgccggctcgatcagtttattcttttatgttaacggaaaaatgtaccgcgccatcaaaaacatgatcccggccagcctggcaaaaacaattgtaaaataagccggcggatggaaacgggaaagggcggatggtttgcctggttacagaattcataccggagcacatgcatttttttcgtccgggctttttgctaaccaggagccggccgtgtttatacgcgattgaaaaaagggattcgtacccgtccgctttgttaccgtttttgggcggcaatgaggaaaggcggatggtttgcctggttaaggaattcataccggagcacatgcgcctttttctggtcgagctgttttacataatcgaggagccggtcacgttcatatgcgccgccttcatgcccgtggtaaaccacaactgcgatgatcccgccggtttcaagcatggggaaaatctgcccgagtgcggcaattgttgactccggccgggtaatgaccgttttgtcgctgcccggcaagtagccaagattgaacaccgctccgctgattttgccgtgcagcgatgccgggatgcactcgccggcatgttcatggccggtgcagaaaagttcggcgcgcgtaacgaggccttctttctccaggcgttcctttgtccgttttaccgcttccggctggatatcaaaagcaaacacttttccgctttttccaacccgtttggcgagaaaaacggtatcatgcccgttcccggccgtggcatcaatggcaaaactgccttctttcacggctttttccaacagtgaatgggcaaatggaagaacaggaagcatattcatctttgcaacatctccattttttgattggtctacaggcggaagttgaacgcctgtttcttttttaccgtaaaaaggcataagtgacacgttaaaaatcatgttttacatcaaatttccattctaacaggaatgccggaatgaaaacggcaaaatcgttcttattcttcagacatgcaggctcgcgcgccaaaatggtaataaaccgtctttctgcagcgcgctcttttgcattttaccatgaacggatgcaggtgcaaaggtgggcggattcggaattgctgtccggaagaaactcccaatgcgcaggggaaacaatttttctgcacggggcatcatacaaatgaagcttgtacgcttcaaagcataaagggggaatcgtgatggccacacgggaagcagtcgaaaattgtatcaaccgctgcgagcaagccgttcaatcggcacgtgagcaatttgcggaaggcaaccgccaggaaaactacggctattatgatttttcggagccgttaacagagctggaagacgcttataacgagctttgcaaactggcgatcagtgccaattcccagcagcgcgagcgcctccaccgtatgcgccttgtgattcagcagctgcaaaacgagatgattttgcaggaacatgaaccgaccatgtaattgccggcaaaaacgaagcttgcgagagcaaaattgccgataagcaaaacagaaaagccaggcaagatactcctgcgaaaaatctggcgtgaacaacgggaatatgggaacggtttcagcacggcaacttgggaaaaacagcaagtaaagccggccggattcatgaaagcgggataaggcacgggccttatcccgctttccatgcaaatggcggcgcaaacagagggcgggaattgccataatatttatattttgcaagaatgcttgtaactgccgggaaaaacccctacaatttcctttgaccgattcattagcaggggggcattctttttgccaaaaactgtgtggctgctcgtcattggcatggcagtcaatatgactggcgcttcttttttgtggccgttaaattcaatctatattcacgatcatctcggcaaatcgctgtttatcgccgggctcgtgctcatgctgaatcattttacaagcgtcatcggcagtcttttgggcggctatttgcatgataaaatcgggggttatcgttccgtgctgcttggcggcctgatttccgccgttgcgcttgccggcttgacatggaaccacgcttggccggattatgtatttttcctcggcgcaatcgggctcggttccggcatgatcggcccggcgatccttgcaatggcgggcgcggcttggaaaggcggagggagaaaagcgttcaatgccatctatgtcgccaacaacatcggggttgcactcggtgccgcgctgggaggtgtgattgcctcttattccattgaccttatttttgcagcgaatcttgcactttttctcgtttttatggcgattgccatcttcggctaccggaatattgccgaaaaacatgctgggtatgcgggagcagccgctgtttctgccaaaagtgcaggaagggcgcaagtggcatccctcatcatattatgctttgcttatttcctggcatggacggcgtacacgcaatggacggctacgatttccacttatacgcagacgcttcatatatcgctgaacaagtacagctttctttggacattgaacggcgcgatcatcgtgctcggccagccgctccttttgccgtttttaaagcggttcttgccggaagtcaaacagcaaattgttgctgggacggccatttttatgctgtcattcgctgtcgttgcctttgccgggcattttcccggttttgcagtggcaatgggcattttaacggtcggggaaatgcttgtctggccggctgtgcccgcagttgccaatacgctttcgccgaaagggcgggaagggttttaccagggcatcattaacagtgtcgcaacatgcggcagaatgattggccctgttgtaggcgggtttgtcgcagatgcattcggcatgaaggcattgttcggattgctcattttctttctcgccgtttcccttttactggccttgttgtatgaccgcccgctcgcaaaaaaaccgcattctgaggtggcaggaaaataatgttgaaaccgggaatgaatttctgtaaaataggttataaattgaataaacgatagaagaacgttgacaaggagcagtaacggcggcactgaaacaagagaattggcgggaggtgcaagccaatcagggaaccccgtgaactcgcctttgagttgcaaatatgaacccgttttagtatttgccgtattccgcgttaaggacttaaagtgagtgcttgcactaatttgggtggtaccgcgggagaaccctctcgtccctttttcgtgggatgggaggttttttgtgttgctttgttgtcaatgtcgatacataaaaaaggaggagtctgtcatgagttttgaccaccggaaaatcgaaaagaaatggcagcattactgggaagaacatcaaacgttccgtgccggtgaagacgaaaataaaccaaaattttactgcctggatatgtttccgtacccgtcgggggcgggcctccacgtcgggcacccggaaggatatacggcgaccgacatcatctcgcgggcgaaacggatgcaagggtataatgtgctccatccgatgggctgggatgcattcgggcttccggctgagcagtatgcgattgataccggcaatgatccggctgttttcacgattcaaaatatccatacattccgccgccagatcaaagcgctcgggttttcctatgattgggacagggaaatcaacacatctgatccggaatattataaatggacgcagtggatttttctgcagctgtggaaaaacgggcttgcttatattgatgaagtgccggtcaactggtgccctgcgctcggaaccgtgcttgcaaacgaagaagtcattgacggcaagagcgaacgcggcgggcatccggtcatccgcaaaccgatgcgccagtggatgctgaaaattaccgcctacgcggaccgccttcttgaagacctcgaggaactggactggccggaaagcattaaggatatgcagcgcaactggatcggccgttcggaaggggcggaagtgacattccaggttgaaggcacaaatgaaacgttcaccgtcttcacgacccgcccggatacgctgttcggggcgacctacgccgtgcttgcgccggaacacccgcttgtggataaaattaaaacgaaagagcaggccgaagcggtccaggcttacattgcccaggtgcagtcaaaaagcgacctcgaacggaccgaccttgcgaaagaaaaaaccggcgtatttacaggggcgtatgccgtgaaccctgccaacggcgaaaaaatgccaatctggattgccgattatgtattaatgagctacgggacaggcgcaatcatggcggtgccggcccatgacgaacgcgactatgaatttgcccgcaaattcaatttgccgataaaagaagtcgtcgcaggcggcaatgttgaaaaagaagcctataccggcgacggcgaacacgtccattccgggtttttaaacgggctgggcaagcaggcagccattaaacgcatgatcgaatggcttgaagaaaaagggattgggcagaaaaaagtgacataccgcctgcgtgactggctgttcagccgccagcgttactggggcgagccgatcccggtcatccactgggaagacgggaccataactgccgtgccggaagaagagctgccgctcatacttccgaaaatgagggaaatcaaaccgagcggaacaggcgaatcaccgcttgcaaatgttgaagaatgggtcaatgttgtggatccggaaacagggaaaaaaggccggcgcgaaacaaacacgatgccgcaatgggcaggaagctgctggtacttcctccgtttcatcgatccgaaaaaccgcaaagcgattgccgatccggaaaaactgaaaaaatggctgccggttgacctttacatcggcggggctgagcatgcggtgcttcacttgctgtatgcccgcttctggcataaatttttgtacgatatcggcgttgtgccgacgaaagagccattccaaagattgttcaaccagggcatgatccttggcgagaaccatgaaaagatgagcaaatcgcgcggcaatgtcgtcaatccggatgacattcttgagtcgcacggggcagatacgctcaggctgtacgaaatgttcatgggccctttggatgcttcgattccatggtcgacaaacggccttgacggttcccgccgcttccttgacaggatctggcgcctgtttgtgaatgaagacggcagcctgtcagaaaaaatccaggacaaggccaatccggcacttgaaaaaacgtatcatctgacggtcaaaaaagtgacggaagatatcgatgcccttcattttaacacggccatttcgcaattaatggtgtttatcaacgatgcctataaagcggaagtcataccgaaaacgtatgtggaaggcttcgtcaagctgctgtcgccgttttgcccgcatattgccgaagaactgtgggaaaaactcggccacagcggcacgatcacatatgaagcatggccttcttttgatgcttcaaaactcgtcgacaatgaagtggaaattgtcctccaggtgaacggcaaagtccgtaacaaagtgaagatcgaccgcaacatgagccgcgatgacatggaaaaactcgcgcttgcggatgaaaaaatcaaagagtttacggaaggaaaaacgattcgcaagatcattgccgtgccgggcaaacttgtcaacattgtggcaaactaatggatttccggaaagcggggctttacggtgaaatggccgtaagccccattttttatgcgtgaaattcataatttgtttgtgaaatagcaaactaggactatcaaccacaaaaaaggggaaaaaagatggttcttttattttcacttttggcaggggcgggactggcatatttatcccgcgcgctgtttcaggcagaaaaaatgaaatcattgctgctttacttatggttatattactggacaatcaattttttaaggatattggaaatgaacctgcactttgttcatgatcaccatacaccgatgttctatatttccaggttgcttgttctgtttcaggtgccccttttgtttttgctgtatttgcacgtatttcacatatcacggacgtccggccggaaaaccctggccgctgtatgttttttccttgtttttacgggttatgtcgccatcctcgattttttacaaattctgtatacctacgaatggtcatggcggtatgcctttgctttcttctttactgatcttgcggtggtacacgtgggcgatgcgctctatagatggttggacaggaaaaaggaggtgcgccggcatgcttccgaaaaaatttgacgagaatgaaatctttacccttgttgctttggcaggtttgatgctggcactgtatcttcttccaaaagccgtttcatggaaagcagggcttgcgaccgggctgttttttacagcaatggcctgctttgcggatgaagtgcttagctggatgcatcctttaaacttatactatacatttgattccaaagatatcgaactattcgactttattatttatattccggtttttactttgtacggctatttgtttattacggtacagagtttattccgggcgcggcttcgctctgtgcgcatcgtgctgttttatttgcttgtctggattggattcacattattgatggaatccatttccgttcggttcggggtatttcattacttggaagggtgggacaatctccattcactggttgcctattgcttccttttcccggtattttatacttatgccaattggattttaaaaatcgaagcgcctgattaaaatgttctgaaattggagataatagaaataaataaaacagggaggggccacaatggtacaggttaaactttttgattgtgaacatgagaaagaccttgaggagagcatgaatacgtttttggaaaaaatcagcgaagaccagctcattgatgtcaaatataatattgccgccatggtggagccggaggacgacgaccagatttactgtttttcggcgatgattttataccataaataaagcggggttgcctggcccggatttttttcgtccacacgattgtaaaatatgatccatggcagctgcagccccaattgccatccatcccgccgcctgtccgcgaaaaaaattcttcataaaaaaattgtcaagcgggtatgttcgcggtacactacattatagtgtgtgaaaaaaggcccgtccgcatcaggggcggccggaagatcatttcgggcgggaagggattttatgtcttcaaaattattgcgcggcacgtttattttaacacttgggacgatcatttcgaaaattctcggggtattctatgtgattccgtttgatgcgattatcggcggatcgggaccggaggcactctatcagttcggatatgtcccttacaatatttttatcagcatttccacggcaggcgtcccgcttgctgtcgcaaaatatgtggcaaaatacaatgcgctggaagaatatgcggtcagccggaagctgttcaggtcgagcatgtatttaatgattgtgaccggtattgccggctttcttgtgatgtatgtttttgccccgtattttacggatttggcgatggccggcaagcaggaagcgcaggttttctcaaaagccgatgtgacggtggtgatccgggcggtcagttttgcgctgatcattattccggtgatgagcctgattcgcggttttttccaggggcaccagtcaatggggccttctgctgtttcccaggttgtggagcaggttgtccggattttatttatgctgatcggtgcttacgtgattttgcatatccttcacggcagcatcgtgtccgccatcagtgcggcaacatttgcggcttttgtcggcgggatggcgagcctgtttgtgctcatttggtactggttcaaacgaaaaccgcatcttgaccggctgcttgaacaggacaaaggcacaatgcatgtttcgatccccacgctgtataaagaaatcatcctttctgctttgccgtttgtatttgtcgggatcgccaattcgctttaccaaatggttgaccagctgacagtgaagcgcggtatggaagcggtcgggctcgggaaaatgtggcagacgcagctcgggatgttgaatttccagtcgcacaagcttgtcatcattccggtctcccttgcgaccgccttttccatgacgcttgttccgatgattacggaagctttcgcaaaaagggagcgcgatatgctcgtccgatctgttgaccagacattgcaggtgctgctttttattacggtgccggctgcgcttgggatgtcgcttttggccaagcctatttttgcgattttttataatacggataacgccgtctcggtcagcgtgctgatgcattatgcgccggttgctattttgttctcgctttattccgtgacggcggcgatcatgcaggggatcaatgagcagcgctggacgattttaagcttgctcgtcgggcttttgttaaaattaagcctgaatatcccgctgatcaaaatgtttgggattctcggcgcagtctacgccacggcaatcggttatacagcgtcgattctgatcagctttattgtgatcaaacttttcgcagcctatccgtatcggacagtgatccggcgcacgatcttgattctgatttttaatgccgtcatgctggcggtgaccggtgccgtatataaagggctcacgcttgtgctttcgccttcttcaaggtggcaggcattgctgattgtcacgatttgcgccgcggccggtgcggttgtttatgcctaccttggcctgaaatcgaaacttgcggacaagctgttcggcgtaaggattcaacgcgtgaaggccaggttgcatatgcggtaaggaaacggggtgtgtgcggcaggaagctggcttgcgggcaagacgcgggataaagttgtgtatctggttgttttatcgtgacagcgggattgcaagctgcggtaaaaagctggacttcctgccgttttcggttgttcaaccgtttagccgtgggctacaaacgggcgtaaaaagctgccccctctttagcggataggtttccggtgtcagggttcaatgcgtggaggcgggttttcaagcgggagtaaaagctgaatcccactttagcggataggtgcccggtgtcagggtttaatagatggaggcaggatttcatatttgggtaaaaagttggtgcagggaaggcaaaacggatataagggtgaggcgcatttaacttgtgagatggcgttgtggtaaaagaaaatggcggggataaaaggctcttaaacatgccaaaagcggcactgcatgtctccgctgccgctttccaaaaaaacaatttgtttctttctctaagatgacatcttaacttttttgctggttgttgtccaaatccccctgtgtgtgcttttgaccaagtcgttgtatgccagcacattcaaatctctttgaatggtgcgaggagtgatgccgaactcatctaccagttcctgggttgtcacagtccctttctctttaataaacacataaatcgacttaatacgagtaagcatacggtctgttgatggtttcaaaataccactccctcatcttttttccaaagacaaagacgacaaacagctttacaacatgtgtttagcttacaggaatatgcgtgccgttcggacaactcctttttctaaaattttttctaagatgtcagtcaattatattgtacatctttttgcctgaattgacaaatatatcagctcttgtttacaccatatgttgtgcctgctaagtttataaccactaatgatagcgtttttttcaccacccttttccctgggttgctgtaatcccgctaaaggtatggcctttgccagcccgatgaaagacattttgctgtttgcttttctgattaggcgtgctaatggaacaattggtgtgtagtgactggcaattttgtctatttgggcgcccgttccaatcggacaggtcggattggctggtattttgattttaccacgccaatgaaggacgtttcggcagtccaggcaccacgttttgtctttcatcgcggttatgaaggacaatattttgatttccggttcgtgatttgtccttcaccacgccaatgaaggacatttcgacgattccggcaccacgttctgtccttcatccctccgatgaaggacaaaatgccgtttgccggccaaagttttgtctttcatcccccgcccgcaaaagatatcaattcattttgtaatcaatggaaaaagaagtaaaataaagaacgaatgacaacataaaggagcgacaaaaatggccgatatccactggatggaagaagtattaaaaaggaaagaggatttgatccgcgatctgaaagggattttgcagatcaggagcgttctcgatgaagcgaatgcaacggaagaagcaccactcgggcaaggcgtcagggaggcgctccaatatatgctcgatctcggtgaaaaagacgggttcaaaacgaaaaatgtgcaaaatctcgccggccaccttgaaatgggggaaggagaagacattctcgggatcctcgggcatgtcgatgtagtgccggagggggacggctggacagttgacccgtacagcggcacagtcaaagacgggaaaatttatgcgcgcggctcaagcgacgacaaaggcccgacaatggcggcttattacggcatgaaaattgtaaaagaactcggggtgccacttgaaaaaagggtgcgcctcattgtcgggacagatgaagaaagcaactggagatgcatggacgcctattttgcaaacgaggaaatgccggccatcgggttttcgccggatgccgacttcccgatcatttatgcggaaaaagggattgccgattttgacattatccaggatccggaaaaaacggaagacccgcagcaggcggaactgctttcttttgaatcggggcgccgctacaatatggtgccggactatgcggaggcacgccttgtcgcgcacggcgagcagacggaacttttgcaaaaattccaggattatcagaaggaaactgggcttgccgggcaggatttcgtggacggcggcgttttgattttaaagctggaaggcgtttcggcccatggcgcggaaccggaaaacggaaaaaacgcggggctttatctggcaaaatttttaaacagtgtggcgcttgaccgtgccggggcaaaattcatcaaaacgctcaaccagttcttcggccgttcacgcggtgaatatttcggcatcgggtacaaagatgaagtttccggggaattgacgatcaatatcgggatcatgtcctatcatcaggaaaaaggcggccgcataggattaaatatgcgttatcccgttactttcgatcttgaagcaggaaaaacaaaaattgtgtcgaaattaaaaaaagacggcttgcgtttcgatcatttttccgatcagaaaccgcattatgttgacaaaaatgacccgctgattacgacgcttgcgaaagtgtacgaggagcagaccggagaggaagcgaagctattggcaatcggcggtggtacatatgcacgtacccttaaaaaaggtgtggcatttggggcgcttttcccgggacgcgaagatgtcatgcaccaaaaagatgagtacatgtatgtggaagatttgctcaaagcaacggcgatttatgcacagtccatttatgaactgggcgggaagcacgcgtgacttcagctgtgagcgtcaatgccggcgggatgcaagcaagcacagaaatgggcgggaaagccgcaataaaatgaagaaaggcaaaggggttgcatcatggagaaactggttttaaacggcaccctggtcgacaggggagaagcaagtgttgatattgaagaccgcggttatcagttcggggatggcatttacgaagtggtccgcgtatacgggggcaggctgtttacaagcgaaatgcatttaaaacggctctattcaagcgcggaaaaactttcgctccacattccgtatacaatgaagcagctgacggcgcaattggaagcactggttgcggcaaaccagctccatacagggattgtctatttgcaatttacgcgcggcgtcgcaaaacggaaacaccattttccggaaacaagcgaaacgacgtttgttgcatacacgagtgaaatggaacggccgctggaaaaaatgagaaaaggcgtaaaagcggtgcttgcggaagacatccgctggctgcgctgcgacatcaaaagcctgaacctgctcggcaatgtgctcgccaaacaaaaagctgcggaaaatggcgcttatgaggcaatccagcaccgcggcgaaacagtgacagaaggttcatcgtcgaatgtatttattgtgaaagacggcgtgctattgacacacccggcaacgaacctcattttaaacggaattacaagacaagtggtctttggcatttgcgggaaagaaggcattccttttcgggaagagccatttacggtagaggatttgtgcacggcggatgaagtcctgattacaagcacgacatccgaagtgatgccggttgtggacattgacggtaaacccgttgcaggcggaacaccgggcacggtaacgttaaaactgcagcatgcttttgatagggagattcatgccctttcggctcaagcggttccgggggcgccaaactaaaagaaggggcattcctttagccggagaaacggttaaaggaagcccctgctatttttggagcctggcctcttcttctcctgccggttcaagctccgacatgcgggcaagcacaatctgatgaagaaacggctttttcagttcacaatacccgcttttgtaaataaatacgatttcacaattctctcctttgtacatgacatggtcgccaatcttcactccagctcccccccttaacatatttatatacccgattttgaaaaataaaaacatggaaaatggcagaaaccaagttttgcacagtataccagcagggcggtttttgttaaaataaacacaaaaccatgatggacaggggtgaaaaaagcgatggcaaaccattatttttatgccgtcatgctgccggaagcgctcaaacaaaaattgcagcaggcaactgccggcatgaaaagcagcctgccgttccagcgatgggtgcaccgcgatgatgcccatattacccttgcttttttgggagcggcagaagaggcgcaattggaaaaagcgaaccggctgattgcagataaaatcagcacattccgcgtgctgccgcttgtgttcgaccacttcggcacttttggaaaaaaagaacaaccgcgcgtgctctgggcaggcatacaggaatcgcagccgctttttgatctcgaaagaatggtggccggctgttgccttgaagcaggattttcacttgatcgaagaccgtttcacccgcatattacgctggcgcggaaatggggcggcgacaggccttttgctgccggcatgctggacaggtatttgcctgaaccggtgcctttttcggcagaccggatcgtgctctaccggacgaatctccataaaacgccaaaatacgaaatcgtgcagtctttcaggctggctgatgcacagaatttgaagtaagggaaaaggaaaatgggacagttattaaaaatgcaagactttgtatcacgttatgaaacagacttaatccgttacaccaaccagtttatccggctgaaaaaacaacagtgggaaaaattccgggaaaactgggaaaacgggccggaggaagaagaggaagcgcctgcgccggaagaatcgcgccaggtcctttcccgcatgaaacactggctaaaaagaaaagatacggccgaaacagaggagcaggccgcgccggtttcccccgcgcctcccggggaattggattttgccccgcagcttgcctttttgccggagacggaagaccagttaaaaaaattatttctcgaccagctgttccgtttccagctgaaatgggccagttccactttgctgcaacagtccgaaatcccggctgtcctttattttgacccggatttaaaatactttttgcaaagatttccggatacatttttattgatgtaccggccggttctttccttcaaaaaagccgtcttggaaatggaacatcttttgatttcgccaatggcagtgtggtgtattgcctttgtggaaaaagaaaaagatgccgtctttttcgggtcgaacggccgtttctggaagaagcggacagccaggaacgaagaaaagattttaaatccggccattgccctcgcgcggacggaaaaaatcgtgcgcagcatcctgaaacggcatgatatcacgtttccggtcgaaagggcgctcatttgccggaacgggtttatccaatggccggatgcgccggacggcctccatattcttgacaaacgcccgcatgccgaatggttccggcatcagcggaatttgcgctcgccgtttaaatatatgcagctgaaggcggcgcaagtgctgcttaacgaatgcctggctacaaatacaagttccggaaacagcggggctgcccgtggcgggggcggggaataaagcgggttgtcccttgtaaaaattttatctgcagcattggaaaatttttggcatacaaaaaagccgccttaccggcatttcaacactttcgggaaacccgggcccgtgccaaaccaaaattgcgcttgacgaaaaaagtcaaaaagcgataaaatttactgaaaggtggctattgtgaatgatacttgccaatagctgtctttttttgtttttgtctccgtttgccgtgaaaaaaccggcagctgaggatttttcaacaaacatgaaaaatctgcgccaatattttgtgtaaaatggaatggcattttttacttttttacaaatcctgcttttcccggctttataacagggacgcaaagtttcgtccattttatatcgctgttttttcatcgatgtgaggttgacttactgaatttgaaggtgaacatgttggaagatatattaggaaaaggctgggagatcatgccggcagggggggcgacaggagaagccttctatgccaaataccaggaacaatccctctttttaaaacggaattcatcgccgtttctggccgtgttatccgctgaaggcattgtcccgaagcttgtctggacgaaaaggcttgaaaacggcgacaccatcactgcccagcagtgggtggagggcagggaactaaagccttacgaaatggaagaagaacgcgttgctaggatgctgaaaaaaattcacgactcaaaaccgcttttaacgatgctgcaaaggctcgggctggaatcgatggagcctgaaagcatgctgcatgatctcaaatccggcgcaaaaggggaatggcccgatacaccgggtgttttggatgcccttgaatttctcaaacgcgaacagccgaacgttgcatacggagattgtgtcgtctgccatggcgatatcaatcataataactggcttttatcaaacgaaaatgaattgtttctgatcgattgggacggcccgctgatcggcgatccggcaatggacatcggcatgcttctgtacgcctacattccgcccgaaaattggggaaggtggctgcgccaatacggcacggaaatgaccgaaagcctggcgctccggatgaaatggcacaccatttaccaggcgatcgtaatgatttgctggcataaagaaaaaggccggtacgaagaaatgcagcactggcttgattttttgcagagtgtgcatggcggcgtgaaaaaataagagaaggctcatccgcgtttgcccgggactgcttttacaggggctttagagaacgctggctgcgggcttattgctttcgaaaaaagagtgcctggtgtttccggtttcgaatgaaaaagaagagaaaccgggtgatggtttctcttctttttgccgctcctcattctttaaaaataggtgttcagctggtcaacccattcctcaagcttgttttggtgggcttcaatatggtcgtccaaatgctgtgcatattttcccgcctggctgtagctgtaaacatctgtcagcgtttgtttcatatcatttgcgacagccggattgacgagcaatgatttgaccagcctttccaattgttcacattctgaaacagatccgcagcattctgtttgatgatcgtacaaaatatccatcaataaggttaactggtcgcgatggctgagtgccaagtggaacacatccttcacttgagatatgcagctgttgacatgtgcatgaaggtcttgcgccggtgcctccatacatactctattgtttaacctgcctctttttttatgcaggcaggcctggcttttgccaaaaaatataagttggggtgtttttatgagattacggaataagccgtgggcggaagaaaaattaaagaagtacccgcaattcgtcgtaccggacccggaaaaatggcgcggccattggcaagcgctgtttggaaacggcaacccgctccatattgaaatcggaacagggaaaggccggttcatttccgaaatggcggaacagcatcccgaaatcaattttctcgggatcgaaaaacagccgagcgtgatcgtgtctgcgctcgataagctgattgaaaagaacagcccgaatgtaaaactgttgaatgcagacggtgcacggttgcgggaattttttgcaaaaggcgatgtcggacggatttatttgaatttttccgacccgtggccgaaaaatcgccatgaaaaacggcggctcacataccgcacttttttgcagctttatgaagacattttggcggacggcggggaaattcatttaaaaaccgacaaccagggcctgttcgaatactcgctgcaaagtttttctgaatatggcctgctgttaaaaaatatcagccttgatttgcatcgcagtgatttttccggcaatgtcatgacggaatatgaagaaaagttttccgcacaagggcagcgcatttaccgctgtgaggcaaaataccgcaacgcgcccggcgcactgcaaggataatggcagtgcgccgggcgcttttttttgcatcgcggcagggaaaaacgcaacgttattttcaattttttgcacgaggaacaggctgggaaaacgcaatggcattttcagttttttgcaccgtgcagcaggctggggtaaacgcaacagcattttcagtttttggcattacggaactggctgggaaaaaccacaagggcaaagcgagcagggagcattgccttttttcgtcgcggcacaggcaggaaaatgggaaatggcagcgaatccttttaaatgaaatcgattacaggagggaaaagaatggaacatttaacagtcggtgaaatgaccctttactggctcgatggcggcgtcacgcatctggacggcggggcaatgttcggcgttgtcccgaaaccgctttggtcgcggaaatatccatacaatgaaaaaaaccagatcgaacttcggacagacccgatattttttcagctgaacgggaaaaacatcctcattgagtccggcattgggaacggaaaactgacagacaagcagaagcggaattacggcgtcacagaggagtcgcagattgagcgcgcattaagcgcattcgggctgacacgtgagaatatcgacattgtcctgatgacgcacttgcattttgaccatgcatgcggcctgaccatgccggatgatacaaagggatatgtcccttcatttccaaatgcggccatctatgtatctgaaacggaatgggacgaaatgcgccacccgaatatccgttcaaaaagcacgtattggaaggaaaactgggaagcgatccagcatcaggtacaaacgtttaaagaagaagttactattgaaggcaaagtccggatggtacatacaggcgggcacagtgacgggcatgcgattgtcatggcggagtccggcggcgaaaaatggatccatatggcagatcttttgccgacgcatgcgcaccgcaacccgctttgggtgatggcttatgatgattaccctatgacctccatttttcaaaaacagaaatggattgaagaggcgatccgggacaatgcctggtttgtattttaccacgacgctgtctaccgggcgctgaagtgggatacggacgggaatatggcagaaaaagtggagcgtgaaaaaacgcccgtataaagcagcaaaaaaacggtgaacaaaaggtccgccgttttttactgccgcgtatggaaaacgatctatgcacatatttttcttgcatggccataaccccctgcggcttcctgctaaactggccggtattgagaagggcggcatgaacccccgcccttaaaccgattctgcttactgtccggtacagagccggcatgaaaaaccagccctaaaccgggatatccggaacagagccgggtttaaattaagaaacccgtgcgcatagagccggcatgaaaagccagccctaaaaggatgctgcttttccagccatccggcacaagccggtttacaaaaccggtccttacagatctgcttttccgttaaatcggatagacatcgaggacggtgccggttttggagtcagcaataaactcgtactgcttcttctccccgtcttttgtaagcgaaaccccgcccttataaaccctcgttttaaacggatatttttcataatcttccgctgtcatttgaatccaggaaccgtcaatcggcccgttttctttaaacgctttcttgacctttgcaagaacggtttctgcggatacgttaacggtatggtgcaatgtttcatttacggcataccctgcggctgcgcccactgcaattccggctataaaagttttccaattcataagtgcccaccctttcattatttagtgcatctaatatttcacttagctatcattatacactgaaaaagcaaagaaagataacgatcggaaaatttgaataaaccagctttttcagatcggtcgcttctttttccgcgccaacacttctgcctttcgagaaaaattttaccacacagacatttctttgcaacgtccacaggcttttgtcccgggaaaaacgtccggttttgcgggggacagcgttttgtaacaaatttgccacaaattggtggtataatatgttggaaaatcgggaatagagtataagcttcaatggcttcatcacttggcttgagaagtgttgatatatccggcagatggaaaaacagggggaagaaagcatgggctttaagaaaaaacagtatgcagggttcggcgtgatactcgcttttatgcttgtcacggctgtcgtcatgctcgtttccatgaaccatatgaaaaaaaacatgtctgaaatcgtgcaggaccgctatatgaaagtaaaaatggcaacggagatccagctgctgttttcgcagtccgaccgggaacttttagccattatcaatgatgaaaaagcaagcgacacggaaaccgccattcaaaatattacggctaaccgtgcaaaaatcgaatcaaggctgaaccagctagacaatatattaaaccatagccaggcaaagaatattttggcaaagctccaaaatgaatttgcttcctatacggaaacggaagaaacgattatcaatgatgcacggcacaataaaacggtgccgtccggggtgatttccgactatcaaacgaagcggagccatttaacggcatacattaccgattttaaaaaattccaggaaaacttgatgtcgaaagcaatgaaaaatgccagccagctggaaaaaaacttgctgcagatgattgtcgtttcttccgggctgatgattgctgttatgctgtttattgcttactggattgtatcgggaacggggaaaagcttaaacaacatctcaaaagtaatggcgcatatcaattacgatgaccttacgtcactgccgcgggtggatgtgaagacagaggatgagatcggagaaatcgccgcggcttttaaccggatggccgcatcgcttgaacaggcaagccagaaagaaaaaaattatatcgaacaaatatcggaaagaaactggatgcagacgacgcttgccgaaatggcgacgatgtaccagaatattacccatatcaacacgctggcggaacggtttattcaaaaagccgtacctgttatggcagcctcgatgggtgccttctacttgaaaagaggagaaaaaacaaaagccgagtttgttaaaattgccgcttatgcggaagaccgcggaaatccgggccgcgaaacattttcatacggggaggggctggccggccagtgtgcactggaaaaagagagccgggtcattaccgatgttcccgaaaattattcgctcatttcgaccgggttaggtgaagcgaaaccgcgcagcattttgatcgcgcctgttatttatgaagaagaagtgctggcggttttggaactggcaagcctggaggagtttacgccggctgagcttgagctcattaagcaaattaaccatacactcgggatggcgattaacagtgtcctgagcagaatggaggtcgagcggctcctgaaagaatcgcaaatgatgacggaggagctgcaggcccaatcggaggaattgcaatcgcaatcggaagagctgcaggcccaatcggaggaattgcagtcgcagtctgaagaattgcgcatgatcaatgaacagcttgaggaacggacgaaagaagcggaaaaaagagcgcatgaactggaaaaaacaaagcagcagctggaagaaaaagcagagcagcttatccagagctcgcagtataaatctgaatttcttgcgaatatgtcgcatgaactgcggacgccgctcaacagcattctgcttctttccgaaatgcttgcggatgaatcggaagagggcaatctgaccgaagagcagaaagaatttgcccgtgtgatccattcatccggtagcgatctgctcaatttaattaacgatatacttgacttgtccaaagtggaagccggcaagatggaaatggttattgaagagatgaatacccgtgaattgccggtgtatgtcggcaaccagtttgcttatttggcagagcaaaaggggcttgaactgaagattgatgtagatgatcatttgccggatttgatttataccgaccagcgccgtttccaacaaatcgtgaagaatctgctttcaaatgccgtcaaatttacggaaaatggttcggtaacgttccggatgcgcaaagtgggtgcagaaacagccggaaaatacgtgaaaacagaaggcgcagatttttggctggaagtggctgtgcaagacacggggatcggcattccggaaaagaaacaggatctcattttcgaagccttccagcaaggggacggcgcaaccggccggaaatacggcggcacgggacttggtttgtccatttgccgcgaatttgcccgcttgcttggcggcacgatccgtctcgacagcaccgtcggaaaaggcagcacgttcattttgtatattccaagcctgccgaacgggatagccgctacggaagaagtgcccgcgccggaaagcgaagcagcgccggcattgctgtatgaagaggatcagcagctgggcgaagaagaatcagccggccgggcgttccggaataaaaccgtgctgatttgtgacgatgacaaccggaatatttatgcactgaaaaaggcgctgtcaaaagaaggcatgaaagtgcttgtgtcgcaaaacggcttcgaatgcctggatatgctgggccttcacaaagaggtcgacattgtcctcatggatattatgatgccgggcatggacggttatgaaacgatgcaaaaaatacgggcgaacgaaaatttttcggatttgcccatcatcgccctgacagcaaaagcgatgaaaggcgaccggcaaaaatgcctggatgccggcgcaacagattatatcagcaagccgctgaagatggaccagctgctatctgtcatgcgggtatggctgccgcaagaataatggcaggctgagggaaggaagcacgtgaaaaagcatgctgtaagtaggggataaagggattcctcacgaggattgttctatgtaaagggaggccgcaatttagcgtggtttcttcccgcaggaatgcttttttagtgaaggaagcccgaaaaatttcgttgctttcttagccgcctgtccggaatggatgcttccttccacaattcaataagcccaaactttaggatgatggagtgcaaaaagcgtgaaaaaaaaccaactaacggatgatgacatcaggaagcttgaaatggatatgctgctatttgccatttaccggatatcaggctatgatttccgccagtatgcccgttcttccattgaaaggcgggttacgcaccggatgcggctcgaaaatctcccgagcatcagtgcgctgatcgaaagggtgatccatgaacccgaattccttgaagtgttgctaaacgatttgtccattcaagtgacagaaatgttccgggatccggacttttttgccgccttccgtgaaaaagtcgtcccggaattaaggcagtacccggaaatccggatctggcatgcaggctgctcctctggtgaagaagcctactcgatggccattcttttggacgaagaggggctgcgcgaaaaaacgagaatttatgcaaccgacatgaatgaacgggtgctgcgccaggcggaaagcggcgccttttcgcttcataaaatgcagacatatacaaaaaattatttccaggcaggtgggaaacgtgaattttcctattattacacggcggatgcccagcatgcctatttcaacaagagccttgcggacaatatcgtctttgcccagcacaatcttgtcacggacggttcgtttaatgagttccatgccattatttgccggaacgtgatgatctattttgaccaaaaccttcaaaaaaaagttttgcgattatttgatgaaagcttaacgaaccggggatttttagggctcggccataaagaaaccgtgctgacgattgatacggaaggaaagtatgaggtttttgacagagatgaaaaaatttaccgaaaaaaagcataatccatttgcaaaaaacggcggggcaatatgaccccgccgtttttcattgcaatggatccggcaaatagccggatccattgcaagtgatataagcgcgcggaaagctgcatcgcacagaaaaagcctgattttccgtttttaagcaaaacagtgcgtgctgaatggaaccggccgtttttttacggcatctgcgcaaggagcctgaacgggcccgacacatccgtcctatggagaaaatggctgatggaactatactcaatttgcctgaacgagcacaacacacatatcatccagctgctgttcctgcagttctttggcaaggacggcatccaggggggcagccgccttttccggagaccaggcggacgaggcgagctgctgcaggatgttcaggccgtcgcggctgtccgaatcgagtgcttccattacgccgtctgtaaataaaaggagctgcaggctttcatggtaacggagcacctgcttttccacttccaattgcgggaagaagccgacagcacatccgccttccgaaagcggcacgacttccttttcatccacgagggcaaaagcgggcgggtggccggcattcacatattcaaccgttttgccggcacagtcaagcacaaggtagatcgccgtaaaataatgctgcatcccgccgtctttattcaagtaacgcatcagttcgtttaattcctgcatcactgtttcagggtctgccttgctttgcattaaatcccttaatttggaagaaataaacatgcagacgagcgatgccgaaatgccgtgccccatcacatcgagtagcatgaggctgtatcggtggtcatctattttataccagtaataaagatcaccggccaattgatgtgccggtttgtaagaagatgtaatggaaaggcagttttctttgatcggttcgctcaaaagcgtacgctgaacctgcattgcaagatcgagctcgtcttttaaatgtttctcctgttccgtatgccagtctttctcctctttcagacgcagtgccactttaaggcgggcgatcagctcgactttgttgatcggctttgtaatataatcgattcccccggcgtttaacgcttccgccagcttccgggcatcatcaagcgcggtcaggaaaatgacgggaatatcacggaaacgcggcgactgctgcagcatccggcacgcttcaatcccgtcaatttcgggcatcataatatccatcagaatgcagtcggcaggtgattttggagcatgttcctcacccagatgcaaataagcgaataattctttagccgaagtgaaagatatatattgatcatatccggcattttttaaaattttttctatgacaaataaatttactttatggtcatctacaattaaaatggtcatgaagtctaccccttatgtaaaaaaatccatttcccgcaaactgatcaactttcattataccgggaaagccgggtgatgaaaaatgaaacagctctgccgttacggtataataaaaagcagaaacagaaactggagggttaaccatgcaggaattgcaatcaatggaagattttaaaaacttgaaagaaaacggggcgcacatttttttgttctcagcggactggtgcccggactgccgctttttagacccgtttatgccggaaattgaagaagcatacagcgattatacttttgtccatgttgaccgcgacaaatttttggatttatgcgcggatctcgatgtatatggcatcccgagttttgtcgcattccgggacggcaaagaaatcggccgtttcgtcagcaaagaccggaaaacaaaagaagaagtcgaaaaattcatcgaaagccttgcctgaatcatcgatgcccatgccgcatggaacgtggcatcacccgaatgcacgcgcatattttcaggaaagacaaaaagcaggccggatttccccctctttgcggatgggggatttttccgtagccggcgataaaggaggtgccagccggaaaatggatacgaaacaattaaggcgggaactggaaaaaaggctggagaaaaaaggccgcattttttcctatgaccgtgaaaaagatatactccgggtcgaaaatgaagacacgcatcagggactcaatatttccctgccggagattgccgccaaatgggtctcccaaaaagaagaagcgattgaagaagttgtctattatgcggaagaagcgctcggcgtgatggggaaaaaccattcactgcatggccgggaaaaaagtatttttcctgtgatccggtctacttcttttccggcagaagccccgggaggcatcccttttttaacggatgcgcacacggcggagacgcgcatttattacgcgctcgacctcgggaatacgtacaggctgatcgattttcaaatgctggagcgggaaggatggagcccggaacatgtccgggaaacggcgcggtttaatttgcggtcgctttccacgaaaatgaaaaaagacactgtcgccgggaatgatttttattttttaaatacgaatgacggctatgatgcgagccggattttaaatgaaaagtttttgcaggaaatgtctgtaaaaacggaaggggagatggtcctcgccgttccccatcaggatgttttcattataggtgacatccgcaatgcaacaggttatgatataatcgcgcaaatggcgatgaatttttttgcaaacggccatgtgccgattacagccctctcatttttatatcaggacggcgaactggagccggtctttattttgggcaaaaaccggaaatcttgaaaggagtacgtttatgaatgttttttacaaccgcgaaggcatcggcgatacattgattgtcatgatcaaagaggcggagcatgccgcttatgaaaagaggggcactgtcgcccgcatttatgatgaaaagacaaaagaaacagccgggttcaatattttcgaagcatcccggtacggggggtttgaaggaagcggacccgtgaaactgacggaagctttgctcgacaagctgaacggaattctcgccgaaaacgggttcaatgaaaaacttgacgccgatctttccccgaaattcgttgtcgggtatgtaaaagaaaaggaaaagcacccggattccgaccatttaagcatttgccaggttgacaccggcactgagacattgcaaattgtctgcggcgcgccgaatgtggaagccgggcaaaaagtagtggttgcaaaaacaggcgctgtgatgccgaacgggatgatcattaaagatgctgtcctgcgcggtgtggcttcaagcggcatgatctgctcggcgcgtgaactcgggctcccgaatgcgccgcagaaaaagggcatcttagtgctcgacgggcagtacaaagtcggaagcgaatttccgctgccaaaataaagccgggatggcaaaaaagggcgcatcacgcgtgatgcagcccttttttacttatcttgatccattcggaaagacacgctggatggtatcgttaaactggttaaaaaatcctgaaatcgggcggccgttccggatgtcgttgacgtaatcactcatctggtcaaagaaatccgggttttcggaaatgtacacatcattgattgatggatcggtttgcttgacgacttttgaaattttgtttttcaatttcttgtcaagtttgtcgttgttttggttcctttccagcaagacagccacataggcattgtcattcgtgacgatgacgaacgcttgtgccacctcttttaaatcctcaatgctgcgcgcaatacggttggccacccggacatcgttgttgttattattgttgttgccgttgccattattgttcgtcaaatcggcgccattattgccgtctgttcttcctgtattgtaacggacgttattgtaacgcacatcattattgtcggctgtgtcgttatagcgtacaggccgtgcattgttgcggttgccgttattgtcgccggcgccgttattgtttccgcatcccattaatagcccggatgcaagcccgatgccgagcaatgcttttgcgatcttcaatccattccctccttcaaaaaatagtatcagtcataatgtgcctacccccgatttttttatgctgacgtgcccgtgttaaaaaatccctcgaaaaacatgtgtttcctttgtataatggaaggtgagaggaatttttgaaaggctcttcggacgcatgagcaaaggaaagagtgatgaatttgagctggattaaaaaaatggcaaaatacttcaaagatgaaaacgtgcacgaagaggcccgggatccggccgggctttaccaggcacgcccggagaatatagatacccgtgtggcttatcattatccgaaaaaacagtttcgttttcctgtgattccggatcaggaaggggaacgccggaagacgactgaaaaaccggaaaagcagcagccgcgggcaaaaaaacatcgtccggatccacggccagaacggggagaaaaggtgcaaaaaggccatcctttccggccgacggacatcccttccccggtctttggattcaaacggccggcaaatgatttgccttcgcaagaagaaacaacagtgttggaatacgagctggaagatcattataaaaaggatatccatctattcgatatggcaaaactgcagcaattgcttgattttgcagaaaatccgggcacggacggcgaagggaacccggcagaaccggaacacggcatccaaatggcggatcattggttcgaagaggaacaaactgatttaccggcagatcaagccgggcgcacaacagcggatcaggcggaaaagggcgaatctgtccaaacggaaacagggcacggcgaagattcgccaggtgcggcagatgaagccgcaggaacgccggaatccgaaacggcatacaggctagaagtacccggcacaattccgtctaatgaatcggaacagccgaaagtgaaaacgtcggaatccggcccggcaagtgcgctgccaaaagaggatgcggcggccatttcttctgaagaatccggtgcaaacccggcagatgaagcagaaaaagaaacaatggcatcctatccggcaagtgaaccggcaaaagggaaagcggaagagaccccggcgtccgctttggagaatatggagccagaacaatatagcataggaacgccggaatctggagcagcagacggattggagaaaactggcataagcctggcggatgaaccggaaacagggaaagccagcctggcaagtgatcctggaaaagtggaatccgaagccgatccggcaaacagaccggaaacagggaaagccgcggctgtttctccgaaggcaagcatggcggaccttgcaaatgaaccggaaaaagtctcttcgatatatgctttggaaaaagccgaaaaaaatgcaggaaatgaaccggaacagcggcatacggaaacggcgggcatttctccgtcatccggcgaagcaacaaaaacggaaggacgcccgagaaagcatctgccgtttaacgtgctgatgctgaaacaggatcgccggaagatcacagaaaaaaaagaggccccggttccccggccggaacaggaaaacccggccgaaaacagtcgtgaaaaaccgttttctttcccgccgctctcgttgctggagccgccggtaaagcagacccgggatgaggggtggatccaagaacaaagctatacgctggatgaggcacttgaaaatttcaatgtccgcgcgaaagtggtaaatgcaagccaggggccttccgttacccggtttgaagtccagcctgaaccaggcgtaaaagtcaataaaatcaccaatctgaacgacgacttaaaattaagcctcgctgcgaaagatatcaggatcgaagcgccgattccgggcaagcatacggtcggcattgaaatcccgaacttgaaaagccgccctgtccgtttgcgtgagattatcggcgatcccgtatttcaaaacagcaaatccccgttgacggttgcgatgggcctggatatttccggaaaaccggttgtaaccgacctgcaaaaaatgccgcacgggctgattgcaggcgccaccggatcgggaaaaagcgtctgtatcaattcggtgcttgtttcgcttctgtataaagcggcgccgcaggatttgaaactgctcctgatcgacccgaaaatggtggagcttgcgccatataatcagattccgcatctcgtcagcccggtcattacagatgtcaaaatggcaacagcggcattaaagtgggcggttgaagaaatggaaaggcgttatgaattgtttgcccatgaaagtgtacgcgatattcaccgttataatgaaatggccgcccgtacccgcaggttttccgaaaagttgccgtatattgtcattgtcatcgatgagctcgctgatttaatgatgacctcgccgggggatgtggaagatgccatctgccggattgcgcaaaaagcgcgcgcctgcgggattcacctgattctggcgacacagcggccaagcgtggacgtcattaccggcttaatcaaggccaatatcccgacgcgcattgctttttccgtctcttcacaggtcgattcgcgcaccattatcgatatgagcggggcggaaaagctgcttggaaaaggggacatgctgtttttggaaaacggtacttccaaaccggtccggctgcagggcacttttgtgagcgaccgtgaaatcgacgatgttgtgtcatatgtaagggaagctgcaacgcctgaatatttgttccagcctgaagaattgctgagacaaacggaaccgggcgaagaagaagacgagctttttcccgacgcctgcgaatttgtcattcatcagggcggggcgtccacgtcacttttgcagcgcaatttccggatcggctataaccgggctgcccgcctgattgatatgatggagcagcaggggattatttccggggcgaaaggaagcaagccgcgggatgttttaatcacgaaaagcgaattgatgcaaatgcaggaagcagaaagcagagagtgatggtttttccttatagccggcagctgttttggcaaggatagtggaaaaagggcatgaagaatgcggatgtgaactgccctttccggcttccggcgggctgcgggcaaaattccgctttttcatgttcacggctgcctggaaatgatataatgatggagtatgatttttttatgatgggcatgaaggcggccgtataaagcctgtacagctgctgtggaaacatgccttatcgcacatggcgggtttttatcatatactgcatacatatagacattgttggaggttctattatgactgtataccatttcgtagggattaaaggatcgggcatgagcgcactggcacagatcctgcatgacatcggatacgaagtgcaggggtctgacgtggaaaagcgcttttttacccagcaggcattagaagatgccggcattaagatcctgcctttcaaccgggaaaacatccgccccggcctgacggtgattgccggcaatgcttttcccgatacgcacgaagaaattgatgaagcgatgaaacgcggcattcctgtgatccgttaccataaatttctcggtgagtttctgaaaaattttacgagcgttgctgtaacaggcgcgcacggcaaaacatcgactaccgggctgcttgcccatgtcatgcatgagatcaagcccacttcctatttgatcggggacggaacgggaaaaggggttccgggagcggaatattttgtatttgaggcatgtgaataccggcgccactttctttcctaccatccggattatgcgattatgaccaatattgacttcgaccatccggattactatgcgaacattgacgatgtcttttccgcttttcaagaaatggcgctgcaagtcaaaaaaggcatcatcgcttacggggatgacgagcagctgcaaaaaattcaggcaaaagtgccggttgttttttatggctttgaagaaggcaacgattttcaggcaagaaatattgtgacggagccgcaaggaacgaaattcgatgtggtggtccgcaatagtttttacggaacgttcgaaattccctccttcgggaaccacaatgtgctgaatgcgctcggggtcatcgccctctgccaatacgaaggcatcgaaaaagaagcggttaaaacgcatttaaaaacatttcacggggtcaaacgccgctttacggaaaaagaaatcggcacgcaaatcatcattgatgactatgcccaccacccgaccgagattaaggcaaccattgatgccgcgcggaaaaaatatccggaaagagagcttgtcgccgtattccagccgcatactttcagccgcacgcaggcatttcttacagcgtttgcggaaagtttaaaccttgcagatcgggtttttctgtgcgatatttttggctcggcgcgtgaacatcacggaaagctttctatttacgatttgcaggaaaaagtcggcggatcgcaaattatcaaggaagaggacatgtccccgcttcttggcattgaaaacagtgtcatcctctttatgggtgccggggatatccaaaagtaccaaaaggcatacgaaacattgctgcaaaagcatgtaagccggtaaggcagaggcattgtccgaaaaacaggcgggcaatgcctctttttgttatgagatttgtcaagcagaaaatgtttccatttttgttggcataaggcggccgttatgcgaaaataagggtggtacccgcaaagatttcaacccccaattgtttaaggaaggcgatttggggtaattttattgtacattgtacatggaggtggtaacgaaagatgaaaattatcctgtatttgagcgtggcgctaattgctgttgcattcctcattctggtcatcgccctgacgaggacattgaaatcattaagcaaaacattggacaacttgtcggatacggtaaagggccttgaagggcagatgcacggcattacagaggaatctacaaaattactagaaaaaacgaatgtgctggttgaagacatcgagcataaattggaaaggctgaacagtgtcgtctatgccgtggaagatatcggtgtttccgcccagcaactgagccagacgctgcgtaaagtcacaacatcgattgcttcggccgtcagcaaaaggcaggacaaaattgcacaggccgtgcaatggggcgctgcgctgaaggaaataaaagatagatggtcgggcaaaaaaggtgcaggcacgaatgaaacccatcctgtccatgcccaaaaccctatcccgaaacaccttcttgaagaaccggcccgtaatgatgaaaggctgctccaacgggtaagaaattcataaactgaaggaggaatttacatgtctgaagaacaaatgtccacgaaagattttttgactggtgcaattgtcggcggtgttgtcggtgctgcggtagcgcttatgttggcgccgaaatcagggaaagaacttcgggaagacttaagcggccaggtggaaaccatcaaaggaaaaacagacggctggcgtgaatttgcgaccgaaaaaggcacccagctggcttcgcaggctgctgaaaaaacaaaacaagtacgcgattttgccgtgcagaaaggcaaccagctgaaagacagcgccgtccagaccgcgcagcaggcaaaagataaagccgaaacggatacgggagatgtgaaccagcaaagttcaaatccaggcagttcctcatcggccggcgagtaacgacgcaaaaaaagcggcatgtctgccgctttttttttgcgcttttcaggcggcaaaacagaacaagacgaatgatacgggctaagagcctgcccctttttgtgcgctttttttcaggccgagcgggaaccttttccgaaaaaaacatataaaacaataacaggacggttgttgctttagtacataaaagcgtttatccagtaaagaatttttccgtgactttttaaaatgaatcgattataataagtgcaatcacttgtaaacttttatggcaacaggcaccggcaacaaaatgagataaggatattgacagagaggatgagaggtacgtggggaacagagagcttgaacaattgcggaaagaagttgaagaagtaaacttaaagctgctggagttgatcaacaagcggggtgagctcgtccaggaaatcgggaaactgaaagaagcccagggcgtaagccgctatgacccgatccgggaacgcgaaatgctgaatgccattatagaacatcacgatggcccgtttgaaacgtctaccattgaacatttatttaaagagatttttaaagcggcccttgaactgcaggaagatgaccaccggaaagcattgcttgtttcgcggaagaaacagccggaaaatacaattgttgacattaaaggcgaaaaagtgggcgacggcaacccgcattttgtattcggcccgtgttcggttgaatcgtacgaccaggttgcggctgttgcggcatccgtaaaagcgaaggagctgaaactgcttcgcggcggcgcctacaaaccgcgcacctctccgtatgattttcaggggcttgggcttgaaggcctgaaaattttaaagcagattgccgatgaatatgatctcgctgtgatcagtgaaatcgtgacacctgctgatctcgaaaaagcggccgattacctcgatgtaatccaaatcggcgcgcgcaatatgcagaatttcgagctgttgaaagcggcaggttccatccagaagccaattctcttaaaacgcgggctcgcggcaacgattgaagaatttatcaatgccgctgaatacattatgtcaagaggaaacggacagattattctttgcgaacggggcatccggacgtacgaacgggcgacccgcaatacgctcgatatcacggcggttccgattttaaaacaggaaacgcatttgccggtatttgtggatgtgacccattcgacagggagaagggatttgctccttccggccgccaaagcggcgcttgcgatcggcgcggacggtgtgatggcggaagtgcacccggatccggcagtcgcgctttcggacgccgcacagcaaatggatttgaaacagttcgatgcgttttatcaggaaatccaatccgccttgccggcgaaaatataaggatcagcatccagccttctgccttgcagaaggtttttctttgtggcgctttttcagttggctacattctgttataaaacgttgaatccggatggttggctaaattcgtttgtgaagaatgtggcaattttgtgtcaaaccttgcaggaagtttttgcctggcttatcatatatggtataatgagaagtctaatgaaccgataaaagtgtcgaacgcgatcgtgtttgggcatttttttgtacgatacaccagaggaaaaagccttacatttctttgtttaagacaggctgattggtgaaaactatgaacaggacttgtatattggagagtgattgaaagatgaatattacgatttatgatgttgcccgtgaagccaacgtttccatggcaacggtctcgcgggtcgttaacggaaacccgaatgtgaaaccgacaacaaggaagaaagtgctcgaagtgatcgaccggctcggctaccgcccgaatgcggttgcgcgcggcctcgccagcaaaaagacgacaaccgtgggcgtcattatcccggatgtgtcgaatatgctgtatgcggaacttgcccgcgggattgaagatatcgcgacgatgtacaaatacaatattattttaagcaattccgaccaaaataaggaaaaggaactgcgccttttgaacacgatgctcggcaaacaggtggacggcattgtgtttatgagcgggaatattacggaagagcatattgaggaatttgaaaaatcttcagtcccgatcgtactcgccgggtcgattgaacctacggggaaaattccgtccgttaatatcgattataaaaaagcgaccattgaagtgatcagcgaatttgccaaaaaaggccataaggagattgcattggtaatcgggccgctgcatgatgcggtcaaccgcgaattgcgcctggaaggatacaaagaagcgctccgtaacgcaggcatcgaattcaatgaggattatgtgctggaaggggactatacatatgaatccggcatagaagcatggcaacggcttcaggaattggacaagacccctacggccgtgtttgtcggaaacgatgaaatggcactcggcgtaatccacggcgcccttgatgccggcgtcaacattccggaacagctggaagtcgtttcttccgataatacgcgtctcgctgaaatggtgcgcccgcagctgacttccgttgtccagccgttgtatgatatcggtgctgtttccatgcggcttttgacgaaatacatgaacaaagaaaccgtaacggaaaaccaggtcatcctgccgcaccgcgtggagtaccggaattcgacaaaataaaaaagcagcatgggcgtaaaacgctgcgcaccattgaaacgaataaaattaaggccggtgctgccagaatggtctggcagggccggctttttattttgtttgtttaatgaattgcagcaaccggttcagcacaagccggtttttttcttcaatttccggtttgcgcgggatcgggcggtataaaccttccgggtcgtcccatctttcaggcagggggtagggggagattttttgccatttttcgagccatgcagcagggatctctccgcctccgcctgccttttccgccatttccagccaaatgagtgaccaggcccgcggcacgacccgccaaatgtcatagccgcccccgccggttgcaatccaccggccttcgcaatattcgtgcgcaattttgtgggccagtttcggaatttcgcggtaaatgttcatcgtcgcggacaaatgggtgagcgggtcataataatgggcgtccgccccgttttgcgtgaccagtacatccggcttgaaatatgcggcgatttcttccaatgcttttgaataacattccagccatgattcgtcttctgtaaacgcatccaaaggaatattgaaagaatagccatatccttttcccgttccccattcgttgacattaccggtgccggggaaaaggtaacggcctgtttcatggatggaaaacgtacaaacattttcatcatcgtaaaaagcccactgcacgccgtcgccgtggtgggcatccgtgtccacataaagaacgcgcgcgccgtattgtttgcgcaaatatttgattgcaatcgccgtatcgttatagatgcaaaatccggaagctttgccgcggaatccgtgatgcagcccaccaccaaggtgcaaggcatgccgcgccctccccgacatcacttcttcggctgcctgcaatgtgccgccagcgattaaagcgcttgcttcgtgcatattcggaaaaacaggggtgtcttctgtcccgagcccgtaattttcagctttgaccggatcaagttttccatggccggccagttttacggcttccacataagacgggtcatggataagcaacagttcttcatcagcagctttccgcggtttgacgatatcctccccgcttaaagccccgatcgtttcgagcagctcttttaccaattggagccgcatctgattaaacgggtggtcatcgcggaaacggtaagccagcaaatcggcggaatagacgaaaacagcatctttcatcgcggcatccccggcatattcggccagagtacttcatagccggcctccttcaaatgcgtaatgagggacaccggattcatcgtgctgacccggaacacgagcacacggttttcctcatttttacggtcggggtaaatcagcacacttaaaatattcagatgatgttcgtatatgatttcggtaatatcgcgcaggatgccggtccggttgcgggtgcggatttcaatctgcgaactcggatgccctgcgccggtcagatcgacaaaagtctgaagcagatcggtccctgtcacaatcccggccagttgcccgttttcaagaatcggcaggcagccgatccggttgtcattcatgagcgcggcaatgtcttcgataaagtcgagcggatgccctgtcaaaaggtccgttttcataattttttcaagcggcagcgaaagtttttccagctgctcgcccgggaaaaacggattgggcgccacttccttgatgtcacgttcagtgacgaccccgcacagtttgccgttttggtcgagcaacgggatatggcggatctgttccttctgcatcaattttagcgcgtcctgtacggtatgccggggcgacagcgtcttgacgtctttttgcatgatttcttccacaatcatctttacccatccccttttgccgaagttttagtacatataccggtttttaaagcggatccggtcaaatttttcaatcgattcctgatcgactcttttcccgatccgcaccattaggcagtttgccggatgcgagcaaatttcgggatcgtccgtggcgaaccatttcaagccgcctgctgccatcattttttccatcatcttccggtattcccatacgttcaggccggttcctttcatatcccagtgccagtaatattcggtcgtgataataatataatcttccatcgcgtcgtccatcatggagactttcagcaaatgcttgccgacagcgcatccccggtattccggaatgacttcgattgcgccgagttcgagaagattgtccatatggccctctgaccagcgttcgagcgggtccgggaaaagaaacgtgacatagccgacgattgtattgccgctgcgtgccagaatgatcctcccctccggtaggtcggcaatttcaatcagggcagcatgctgtttcggcgcggggcggaaagcttttaagtcttcatggaattccatttccgcaagccttttcccgggaaccggcccttcaatcacaagcggccctgcttttgtaggcaattcgatagcataatatgttttcttatgttccatttttccaccatcccttgaacaaatcaaagaaaaaaacagtatgatgaatgaccgttcatttcacaatttcatcatctcatgtttacagaacaaaaacaatatggaaaaagggaaattccagaattgttcacaatggtggcatttgcggaaagaagttttaaattgtgaataaaacagttttcatatataataaatgtgtgaatctaaacaaagggggaccttacatgaaactggaagcgttaccaaccgtacaaggggatttcaatctgaaaaactatgaagaaacccgcaaaacgttcagctggaaagacgccgagaaaaatttttcatggtatgaaacagggcgtgtcaacctggcgtatgaagccattgacaaacatgcggaaagctcccgcaaaaataaagtagcgcttatgtacttaagtgattcacgcaacgagaaatatacttactatgaaataaaaaggctgacaaacaaggcggcaaatgttttaaaagaaaaagcgggcgtccaaaaaggtgaccgtgttttcatctttatgccgcgctctccggaactgtattttgccatgcttggcgccatcaagctcggcgccattgtcggcccgctgtttgaagcgtttatggaaggggctgtaaaagaccgccttgaagacagtgaagcgaaagtgcttgtgacaacccctgaccttgtcgggcgtgtcccggccggccagcttccggcattggaaaccatctttgttgtcggggaaaatgtcaaagaagaaggaaagtacaaagactacctgaaatattttaacgaagcttccgataaactggaaatcgaatgggttgaccgggaagacgggctgatcctccactatacgtccggttcaaccggaaagccaaaaggcgtcctccatgtccataatgccatgatccagcattaccagacgggaaaatgggtgcttgatttaaaagaagatgatatttactggtgcacggcagacccgggatgggtaacgggaacttcttacggcatgtttgcgccatggttaaacggcgcaacaaacgtcgttgtcggcggccgcttcagcccggcagcgtggtacagaacgattgaacggttcggcgtcaccgtttggtacagcgccccgacttcgttccggatgctgatgggggccggcaatgaaatcattaaccaatatgacctctcgacattgcgccatattttaagtgtcggtgaaccgctgaatccggaagtgatccgctggggcaatgaagtattcgggctccgcatccatgatacatggtggatgacggaaaccggcgcacagctgatctgcaactatccttgcatggatatcaaaccgggatcgatggggaaaccgcttcctggcattgaagcggccattgttgatgaccagggaaatccgcttccgccgaaccggatgggcaatctcgccattaaaaaaggctggccttccatgatgcgtgccatctggaacaacccgcaaaaatatgaatcttactttttcccgaacggctggtacgtttccggtgactcggcttatatggacgaggacggctatttctggttccagggccgcgtggacgatgtcatcatgacgtccggcgagcgggtcgggccgtttgaagtggaaagcaaactgatcgaacatccggccgttgcggaagccggcgtcatcggcaagccggatccggtccgcggcgaaattattaaagcctttatcgctttaagggatggatacgaaccgtcagatgagatgaaggaagaaatccgccaatttgtgaaaaaagggttggctgcccatgccgcgccgcgggaaatcgagttttgcgaaaaactgccgaaaacccggagtgggaaaatcatgcgccgcgtcctgaaagcctgggaactggatctgccggccggggacctttcgacaatggaagattgagtacgaaaccggacagccttaatgctgcccggttttttcgtctaaaggtttcattgatacagaacagtggaaaaatccccgggtaagtgaaaaaattgagaaagaaaaaatattccgttatcataaaaacatatccttttataagagtgtaaggttggtgttcaatatgaaaaggttcggtatgacgttgctttgccttttcctgcttgcgggctgttccgcacaagggagtgcatccggctcagccaagaagcaatcgaaacaaacagaaatcaatgtggcggcagcttcagatttgacaaaatctttccggcaaatcagcaaacagtttgaaaaacagaccggcatcaaggtgaaacttgtttttgccgcatccggcgagctagagcagcaaattgaaaacggcgcgccgtatgatgtgtttgcggcggcgaacgcggattacgtcaaccagctggcggataaaaacatgctcgttcctggcacaaaaaccgtctacgcatacgggaaaatcgggattgccgccaaacagggcagccatctttccatccgcagccttaaagatttaacccgccctgaggtgaaaaaaattgccattgccaacccggaaacagcgccatacggattggcggcaaaacaagcgcttcaaaaagcggggatttgggatgaagtgaaatcaaaattggtttacgccaaaaatatttcagataccctcacatacgtaaaatcgggaaatacagaagccggcatcgtttctctttctcttgcgcaaggtgaaaagctggctattgccagcatttcaagcagcctgtacaatccgctgaaacagacggcagcggttgtgaaaagctcgaaaaagcaggaaattgcgaagaaatttgtgcattatttagccggcagggaagcgcaaaatacgatgaaaaaatacggctatgcagtgtctgcggggcagtagcaagtggggcaggtcgatttatttcccatctatctgtcttttaaagtggcattgctttcaactgttttttcccttatccccggactgttggcagcctatcttttaagccggtcggagggaaaagcgacggatgtggcagacgctttgctgacgcttccgattgtgctgccgccgaccgtgcttggctattatctgctcgtgatcctcggaaggcaaagtgtgttcggccggtttcttgaacaacaattcggagtgacgattgtatttacgcaaacaggagcggtcattgcggcaatgtgcgtatcccttccatttttcatccagtcggcgcgcacggcttttgccagtattgatgaatcgctccttcatgccgcacgccttttggggcggacggaatggaatatctttttttctgtcatgatccctttatcatggcgggggctcacaagcggcgtcatgcttgcatttgcacgcgccctcggcgacttcggggcaacgttaatggtggccggcagcattccgggaaaaacggaaacgatgtccattgccatttacaattgcctgatgaacggggatgaacggacggcagggctcctcgttgcgatcatgacgtttttatcgctggctgtcttatacggcatgaagcggatggaaaaaaagatgggaaggggtggcagcaggcatgctccgcataaacataaaaaaaacatttccggaatttgagctggatgccgcatttgaagcgggccccggcgtcaccggcattttagggccgtccggaagcggcaaaagcctgacgctggagtgcattgcggggatcgacaagcccgatgaaggaaagattgaactaaacggccggatattatttgataaggaaaagcatatggatatcaagacgcggcaccgccatacgggctatatgttccaacattacgccctttttccgcatttaacggtaaaacaaaatcttgcatttggtttaaaggggcggccaaaaaaggaaatagaagagaagacggctgcttttctaaaaaaaatcaaaatggaaggttttgaaaaccgctaccctgctgaactgtccggcgggcaaaagcagcgtgtggcgcttgcaaggacgctcatcacggagccctcctgcctgcttttggatgaacctttttccgcattggacccggacacgaaggaacttgtgatggaagaatttttatcgtttcttcacgatcattttcacggggccgttttactggttacccacaatatggcagaagccgatctgctttgcgacaatgtcattttgtacagaaacgggaaagtattgcaggcgggcccgaaaaacgaagtgctgaaacacgccgcccggcaagatgcccggaagtgcggaaccagaacatgaaagccggggaccaaagaaaaaggcgtgccgtccggtaaaatgcccggattcctctcaaagaagcggcatgcttcaggcaaacatggcaaccgtggacaaagaaagcggtgtgcgcccggcaagatgcccggaaccgtggaagcagaaccggggaccgaagaaagcggtgggccgcccggcaggatgcccgggttcccgcggcatgacaaaccgtggccagtgcgtgcgccttacgacgggcatgggaactttggcgattaagaatggcagccgggcgcctgcaaacatttggcaaatgcatttttaacagagaaacagaatttaaaacggagatgatggagaacatgctgaccgataagctgaaccggccgcttttggatttgcggatttcggtaacggaccgctgcaatttccgttgcacgtactgcatgcctgccgataacggccagaaatattgttttatgaaccggtccgaactcatgacatttgaagaaatcacgcgccttgcgagactttttgtatcccttggcgtccggaaaatccggctgacgggcggggagcctttgctgcggaaagacatcgatcagcttgtggccatgctccatcaaatcagcggccttgaagatttatcggtgacaacgaacggctttctgttgaaacgatatgccgcaccgttaaaaaaggccggcctttcgcgcatcaatgtcagcctggatgccctcgatccggaaatctttccggccatcaacggcgtcggggcaaaaccggcaagaattttggaagggatggaggaagccatccgccagggcatcaaagttaaagtgaatatggtggtcaaaaaagggatgaacgattcgcaaattgtaccgatggccgcctatttcaaggaaaaagggatttccctccgttttatcgaatttatggatgtcggctccctgaacgaatggaagctggatgaagtcgtgaccagcaaagaaattctcaacatgatttcaaaagaaatgccgcttgaaccgttgaaagaaaattattacggggaagttgccaaacggtaccgttacaaagggacggatacagaagtcgggttcatttcatccgtatcccagcctttttgcggcgactgcacgcgcttgcggctgtcggcagacgggaaaatatacacctgcctgtttgccgcacaaggcacggacctgcttggcgccataagggaaggggcaagcgatgaagtgctggctgcccgcattgcaggcatatggcagaaccgggcggaccgctactcacaagaacggggaaaaaacccgacttttagaggaaaacggatcgaaatgtcgtatattggagggtaaaggattgagcacgaaagaacataaacaacaggctgatcttccggtgctgtgcaaagtgatcaccgtttccgatacccggacggaagaaacagacaaaagcggcaggctgatgatagatttgttaaaacaggaagggatggaagctgcggaatacagcatcgttaaagatgaagcggacgaaatcaggcaggcggttttacagacgaaagaaaccaccaatgccattttgctgaacggcggcaccggctttacgaaaagggatgttacagtggaatcggtccggccgctcctcgataaagaaatgcccggttttggcgagctgttccgctatttaagttatgaagaaatcggaagcgcctcgatgctcagcaaagcgcttgccggcacaatcgggaaaaaagccgtattttcaatgccgggctccagcaacgccgtgtcccttgccatgaaaaaactcattttgccggaattaaagcatattgtctgggagctcagccggcaatgaatacagccggaattgttctggcaggcgggaagtcgagccggttcggcggcgaaaaatcgcttgcgaaaatcggcggcatagagatggtcgcacgtagcgtggatgcgctcgccggaactggggcgatcattgtggtagcgcggcccgggcttgcggaaaaaatcccgcgcaaccggccgattgaggtgattttcgatcttccccgctaccgcggaaaaggcccgctcgccggcatttattcggcgatgctcgcagtggacgcccagtggtacgctgtgttgccgtgcgatacgccgtggatcggaaaaagaacggttgcccggctgcttcaagaacgcgatccggcatatgacgccatcgtggcccgggcagaggggagaatccagccgctcgttgccgtttttcacaacagggtgaaagaaaaagtaagggagcagcttgaaacaggccgcctcagcatgcgggcgctttttgaacgctgccgcctgaaatttatcgattttgcgcaggaaaaggcgtttgccaatatcaatacaaaagaagattatattttacaacaaaaagaagccggtgatgttgatgagaaaaccaatcaaagtggcggaggccatccgcaaagtgatggcccatccgcttgcaggcgaaaaggagcttgtgccgattcagagcagttttaaccgggtgctttccgatgatttggctgcaacccatgacgtgccgtggtttaaacggtcgccgtatgacgggtatgcgattttttccggatccacacttgaagcgggcgcggaccaccccgttctccttgaagttgtcgccacaatcggggcaggttttacatgggatgaagggataaagccgaatcaggccgtgaaaatcatgaccggcgccgccatcccggacggggcagatgccgtgatcatggtggagctcacaaaagaagtggtgcagaacgggaaaacatttgtgcagattaaacggaaagtccggcccggtgagaacattgtcggcattggcgaagatatgaaaaaaggcgaagtgcttgtcccgaaaggcacgctcgttaatccgggcgtaatggcggcgcttgcaactttcggatatacagaagtgccggtcacaaaaaaaccgaaagccgccgttattgcaacggggacggagctgctcgaagccggcgagccgctcgaaaaagggaaaatccgcaacagcaatgcctatatgctctgggggcaaatcatccgcgccgggggcgaaccggttttttaccggcttgtgaaggatgatttcgaggaaacatatgaagcggttaggcaggcggttaaggaagcggatatcgtcatgacaacgggcggcgtttcggtcggcgattttgactatattccgaatgtctacgaaaagctgggggcaacgcttttattcaataaagtggcgatgcgcccggggagcgtgacatcggcggccgaattggacgggaaaatccttttcggcctctccggcaatccgtccgcctgctacgtcggttttgaactgttcgtccgcccgtacttaaaaacgatgcttggcgaacgaaatgtttatttgaaaaaaacgcaggctgtacttggggaggatttcccgaaaccaaacccgttcacccgttttgtccgcgccaaactttcttatcaggaaggcctgctgcacgcgcttccggtaagaagggacaaatcgaatattgtttcctctttaatagaagcggatgcgttgattgtgctgccgggcgggtcccgcggttttacaaaagggaccatggtggatgtgctgatgctggaagacggggaaggggcgcctctttgggatgaaaatattacagatcgcaggccgcaaagacagcggtaaaaccgcccttgccgaactttggacacgggctttggcggataacggataccgggtcggaacactgaaacaccacggccatggcgggaagccgttgctcgctcccggcaaagattccacgcggcactttgaagcgggtgcccgggcagccggggtggaaggggacggcttgtttgtcctcgccgttcgtgccgatcaagggctctcactggagcagctcatcggctggtacgaggcattgccgcttgatttgctgctgatagaaggctacaaatacgcgccttatccgaaagtggtctgcctgcgtgatgaacaagacagggatttgctcagcctgacgaatgtgcgggccgccttcagcctgaatccggcattatccggctgcatgaaactctctgaccggaaaagctgcgtcgaatgggttgaagcgtttttaaaggggtgaaaagatgtttgaaattgtaaaagaaccggtggatgtttccaaactgatccaggctgttgccgaccggaatgcaggcgccattgtcacttttatcggtactgtccgggaaatgacaaaaggaaagaaaacattgtatctggaatatgaagcatacgaaccgatggcccggaaaaagctggaacaaatcggtacggaaatccggcagcagttcccggaagccaaaacggcgatcgtgcaccggaccgggcgcctcggcatctccgacattgcggttgccattgcggtttccgccccgcaccgggatgaggcttaccgggcaaaccggtacgcgattgaaagaatcaaagaaatggtgccgatctggaaaaaagaacattgggaaaacggcgaaatgtgggtcggcaaccaaaaggaaacggttttctatgaatcaggggcaccggaggcgtttgaacgatgattaaagtattgttatttgcccatttaaaagaacaggccggccgttctgaaatggacatcaactgcgaaaaaatgacggtcgccgaactgcgccaggcgcttgcggaaaaagggattttgcagcaggatgcagttatggtggccgtgaacgaagaatttgcccgcgatgaggaaatggtccatagcggcgataccgttgccctcatcccgccggtcagcggaggttgaaagatgggaaacttgacgcatatgaacgaacagggccgcgccaaaatggtcgatgtaacggcaaaaccggaaaccgccaggacggcgcgcgcaaaaagcagtgtgatcgtgtcaaaggaagtctatgaacagattacaaactttaaaatcaaaaaaggggacgtgcttgccgtcgcacaggtagccggcattatgggcgcaaaaaaaacggcggatgtcattccgatgtgccaccccttgcctttaacaggcgttgacatttcgttcagctggcacgaacaggaagacgggtacagccttgatatcgaagcgatggccaaaacgaaagggcaaacgggcgtggaaatggaagctttgacagcggcgtccgtatgcgcgctggccgtttatgatatgtgcaaggcactggacaaaggcatggtcatcgggccgacctatctgatcgaaaaaacaggcggaaaaagcgggcattatatcaggcaggaggaatgagcatggaacggtattcccggcaaatgctgtttgccccgatcgctgaaaacgggcagcaaaacatttcaaaaggccatgtgctgatcattggcgccggcgcgctcggctccgctgttgcggaaagcttggcgcgggcgggcgccggaaaaatcacgattgtggatcgtgactatgtcgatgaatcgaatttgcagcggcaaaatttgtattgtgaggaagatgcgcgcacccatttgccaaaagccatcgccgcaaaaaaacggcttgaagccatcaacagcaccatccggatcgaggcgcatgtgatcgatgcatttgactcgaaatttctttctgttttggaagaaggcgttgatgtgatcattgacgggaccgataattttgagacgcgcttttatgtgaatgacctggcgcaaaaataccggattccgtggatttacggctcctgcgttggcagctgcggtgtttcgtttcccattattcccgacgaaacgccttgcctccgctgcctgattggccatctccccgcttaccacgcgacgtgcgatacagcgggcattatcgcgccggctgtgcaaatgaccgcggcttatgagacaacagaggctttaaagctgctttccggggaaaagccgcgaccatctgttgccgtgtttgatatttggcagggcgaacaccattttatcaaagcaggaaaaatgaaaaataaggactgcccgtcatgcggagggcatccggtctatccggcccttcaatcccaatcatccgccgatgtattgtgcgggcgggatacagtccaaatccgccatccgggcacgttcgagcttgaaaacatggcgcgggagatgaaagcgggcggtgctgccgtgcaatataacggctacttaatgatcactgcgcttgaaggccaccggacggttttatttccggacgggaggatgctcattcacgggacgaaagataagagagaggcccgttcgctttatcaaaaatattttcaatgaaaaaggaagcacgcatttccgtgcttcctttttgaatggcgttaaatatttgccaatgtttcatgatccacgtcttcttttttcggcaccggttcctggagcgcttttcccatgcctttcaaaaaggaaatggcgaaaccgactgcccggttgacgtccgggtcgctcaacgatttcagcagcccgaacaatgtcactttttcctccgagccaatgaattgcttgccttcatcaaagcctgatgatacaccgttcatcaagtggataataaggtcgtggtcggctttcataaagacgccggccgtgccgagcagcatgttgatcaggttgacgacctgttcccgggacaattgctcgaggacgatttttaaaatatcgttttttgcgagaatcattgcatttgcggcttccagtgcaccggtatcattgaaatcatcgatcaggcggatcaaattttcaaacgcatctttatgatcggcaaccagtttttccaattcctcgagcttttgccgggtgatttcttcttccgccggctgctgttttacaatctctgtgatcggagcggccatccttttttccctcccttagcgtacgtctgttaatggttgatagccttcgcgctgccatttccgttcgacttccacgccgcgtgtaggattgcgtttcttatcgcggtggtttgtttttggcagcggcggcttcccacctttttggatcagttccatcttcactttcgtttgtttaaacgccggtgtgctttgccgcttatcgtaaatcggcccggttaagaagttgatcgccgattccttttctgtcgagtgcatcggcaagtacagctcattgccctgcacgcggtctgtaaccagcacatgcagtttcagcgatccgaacggggaagtgacgcggacaaggtctccggtgtcgagattgcgttcttttgcaagctccggtgacacttcaacaaatacgcctggaacttttgattcgatgccttccgatttattggtcaggttgccttcgtggaactgttccagcatccggccgttattaatatgcaaatcgtattgttccggaaattcagccggttttacccagtctgtcagggcaaaccgcgctttgccgtccgggaacgggaagccgtccttgtaaagaagcggggtattggcgccatcaaggcttccccaaaggaaactgttccagccttccaatttgtcgtagtccgcctgtgcaaacagcggagccaggctggccatttcggcaaatatttcgcccgggtggctgtaatgccagtctgcgccgagccgttttgccacttcctggataatccaccagtccggtttggattcgcccaaagccgggagtgcctggtacatccgttgcacacggcgttccgtgtttgtaaaggtgccttctttttcaagcgacggggctgcaggcaaaacaacatccgcatattgggccgtccttgagaaaaagacatcctggacgacaagaaagtcaagattggaaagttcctcgctaacatggttggcgtcggagtcgacaagcgccatgtcttcgccgatgatatacatggcttttaactgcccggctgcaatcgaatgcagcatttcaatattgttcagccccggtttgttgctgattttgacgccgtacgctttttcaaatttttcgcgtgccgcatcatcctccacatgctggtagcccggcagccatcccggcagcgtgcccatatcgcatgcgccttgcacattgttatgcccgcgcaacggataagcgcctgtacccgggcgcgcgtagtttccggtggcaaggagcagattggaaatagcggcggacgtatcggaaccgcctgtattttgcgtgacgcccatgccccagaggatacatgtcccgtctgcctgatggatcatttcggcgatttggaccagcgtttccttcgggatgccggtaatcttttcagcgtagtcgagcgtgtatttttcaagcgtttctttaaattcatcgaaaaagttcactttttcctcgatgaatttttggtcatgccagccctggtcgatgatatattttgtcaccgccatcagccatacctggtctgtgccctggttcggatggataaaaagatcggcgcgctctgccatttcgtttttgcgcatatcggcaacaatcagtttctggccgtgcagtttatgggcccgtttgatgcgggtcgcaaggaccgggtgggcttccgccgggttcgcgccgacaatcatgacaaggccggctgacgcaatatctttaatcgtgccgctgtcgccgcccatgccgacggttctgagcaggccgtccgttgccggcgactggcaatagcgcgaacagttgtcgacattgttggtttcaaacacctggcgcgccagcttttgcatcaaatagttttcttcattggcaacttttgaagaagaaataaaaccgacggaatcttttccgtattgggaatggatttctttcagccggcttgccaccacgctgagcgcttcatcccatgacgtttctacaaattttccgtctttacggacaagcggttttgtcagccgcttatcggaattcacaaaatcccagccgaatttgcctttgatgcaagtggagatggcgtttaccggtccttcatgcttcggttcgatttttaaaattttccggccctttgtccatacttcaaatgtgcagccgacaccgcagaaggtgcaaacggttttcgtttttttcgtgcgctgttcgcgcatcgaagcttcgatttcggatatggcaaaaatgctgccgtaacccggttcgacttttttcacaagatcaatcatcgggtcaagcaggtcttcttcaagcccggttaaatagcctgcctcgccgagcattgatttttccatcaatgcattgcaaggacagacggtgacgcaatgcccgcaggaaacgcatgacgattcgttgatcggaacgccgttatcccaaatgacgcgcgggcgttctgcttcccagtcaatggaaagcgtttcgttcacctgcagattttggcaggcttccacgcatctcccgcatgcgatgcactggttcgggtcgtaccggtaaaacgggtgcgaatagtcgaccccgcttgcgtccgtttttggcgtaaacggatatttctggtgttcgatgcccattttttccgttgtattgtggacgatgcagttgccgttgttattgtcgcacaccgtacagtataaaaggtggttggcgagaatcctgtccatcgcttcatgccgggccgcttccgaccggtcatcgctgaggtggaccaccatgccgtcctccgccgccgtcgaacaggtgcgcatcagttccccgttcacttccgcaatacacgtgtcgcaagtttggatcggatctacttccgggtaatagcaaatttgtggatgaaaaatatcattccggttgatcacatcgatgattttctcgccggggcgggcttcataatcccggccatcaatcgtgatgtgaatcgatttggtttccatttcttttcctccttttgcaaacagtgaaggcaggccttcaggaaagaatacaaaaaaccggcaactctgttacttataccaatcctttgcaaaaataaaactaccattctcttttttattctagcatctgatgcaaaaatgaacaaaccatcagaatgttttgcctatttgagcgggcggcttttgtttttaatctgattcctttaaaataaaacattatagatagggggctgttgaacccatgaaaaatgtggacacgcagagggaaattctccgtttcaagaacgggcggctcgaacgggcgctggatacagtcgcaacggaattcccggtgacattaaaagtgaatgggcaggaatgggtgacgatggtgtgcacacctgaatatatcgaggacatggcggtcggttatcttgtgtcggaaagggttgtccggcgctatgaagatatccgcgacatctggacggatgaaaaaggaggattcgtccatgtccggaccgatcatcttaatccttattacgaacagctgcaaaataaacgttatatcacctcctgctgtggaatgagcaggcaggcgtttgtttttgtcaatgatgctctggcggcgaaaaaaatggacggtgtgcacgtccggattacagttgatgattgtttccggctgatggaagcattgcaggagaatgccgaagtgtttaaaaaaacagggggcgtccataatgctgcactgtgcgatgccggcgggatccttgtcagccggatggatatcggccgccataacgcgcttgataaaatttacggatattgtttgaaaaatcaggtttccacaaaagggaaaatccttgcattcagcgggcgcatttcctcggaaattttattgaagacagcgaaaatcggctgcgaggtgattttatcgaaatcggcacccaccacactcgccctggaatccgctgaagaactcggcattaccacgatcggctttatccgcggcgggtcgatgaatatttacacctgcccggaacggattgccggtgttgccgcccatgcccggtgattgccgggtgtatacgatcggaaaggcacggtttgggttggaagaaaacgggaagacacgctggaaggcgtgcttcgggacggaacagggcctttgccggatgaggaaaggttaaaatgggcattaccgaatttgaagaaagcgctggtgcagcctgctcagttctgaagagtaaattttttactcctcagagctgcagcctgcttggcaaggttgacatttcaaaatgtatatggtaaaaataacttacaatttgatgaatgaagcgtcgaaaggatcaagtagcttcctgttgctgcatacaagagagccggtgggtggtgcgaaccggtacaggcaggcggcgaattacaccccggagcttttgccggatacggcagacggcccccagccgttatccaaatgagtggagaagcaattctcaagttgggtggtaacgcgatacaatcgtcccttcgttttggcggaggggcgtttttctgttttacaggaaaaagaaggcagcaacaggttcctgcccattatcgccggatataagccgggcactggaacctgaatgctgccggcatttgaaatggcacaaaaggagtggtttgaaatggatttactcgaagatttaaaatggcggggaattgtttaccagcagacagacgaagaagggctcgcggagttgcttcaaaaccggaaagtgaccctgtattgcgggattgacccgacaggcgacagcatgcatatcgggcatctgctcccgtacctgacgctgcgccgtttccagcaagcgggacaccggccgattgtcgtgctcggcggggcaaccggcatgatcggcgacccgagcggcaagaaggaagaaagaaagctgttaacagttgaaaaggtcaagcaaaacggcgaagcattgaaaaaacagctggaacgcttttttgattttgacggcgagtcaggcgccatcatggtcaataactatgactggcacggctcgatggatctcgttactttcctgcgtgattacggaaagcatatcggcatcaactacatgcttgcaaaagacacgatcgcatcacggcttgaaaccggtatttcgtttacggaatttacatatacaatcctccaggccgtcgattactttaacttgtataaacaatacaactgccgcctgcaaatcggcggaagcgaccagtggggcaatattacaagcggccttgagctgatccgcaagctcgaaccggaaggagaaaaagctttcgggcttaccattccgcttgtcacaaaagcggacggcacaaaattcgggaaaacagaaagcggcgcagtctggctcgatgccgagaaaacatcgccatatgagttttaccagttctgggtcaacacggctgacctcgatgtcgtaaaatacttgaagtacttcaccttcttgccaaaagaagaaatcgaagagctggaaaaatcggttgaaaccgaaccgcatctccgcaaagcccaaaaagcgctggccgcggaaatgacaaaactgatccatggggaggaagcattgcagcaggctttgaatattacggaagcattgttcagcggcaatgtgaagaaactgtcggctgaagaaatgaagcagggatttaaagatgttccgtcattccagcttgaaagcgaagaacaaaagcagcttgtggagttgctcgttgccgccaaaatctccccgtcaaaacgccaggcacgcgaagatatccaaaacggcgccatttacgtaaacggtgaccgcgtaacggatctcgggtttgtgttgcaggaaaaggacaaaatcggcggcgaatttaccgttattagaagagggaagaaaaaatactttttaattaaacattgaggatattaagggatgcacaatgaagatgcctgaaatgtgcatcccttttttattgctctgatcgcggcttgcccttcttcgtttttcccggcgggggaagtcagctcccaattccaaattttttcagcttctgatacagggtgacccttgaaatgccaagttcttttgctgcggcggatttgttcccgcctgctttgcgcaatgctttttcaatgagctgtttttccatattttctttttccacaggcaaagtgccgctttccgggatggcacttccggacggttgggtttcatttccctggaaaaagcggagaagggaggcgcggtcaataaacggcttttctgataggatcaccatccgttccattaaattccggagctcccggacattccctggccaatgatacgcttgcaggaaagaaagggcatcaggggcgagttccggttcaggcatcttgtactggacggcaaattgtttcagaaagtagcgggcgaggacaggaatatcgtctgtgcgcacccttaatggcggcatcgtaatttgaataacatttaaccggtaataaaggtccgacctgaatgtcttttgtttcatcattttttcaatgtcttggttggtggcggcaataaaacggacattgattttcctgcccgaagcgtcgccaatgcggtaaatcactttttcctgcagcacgcgcagcagtttcacctgcatatctagcggcagttcgccgatttcgtccaaaaacagcgtacccccgtccgcttcttcaatttttcccgcttttccttttttttccgcacccgtaaacgtgccaggttcgtagccgaataattcgctttcaaacagggcggaagggatcgagccgcagttcaccggaataaaagggccgtttttccgcgcgcttgcttcatggatagcgcgcgcgcatatttctttcccggtgccggactcgccgagaataagcgtgacggcatccgttttcgccgctttcgccgcaatttggatcgtatcccggagcgcgcggcttttcccctttaatttggaaaaaggcgtttcttcatagcttgtgtacattttttggcgcagttcattcagttctatggaagtggagacgagattgtcgttcagcctaacaatctgggtgatatcgcgttccacggataccgcgccgatcagcctgccgcggttgtcaaaaatgggccgcgcattgacgacgacatgcttgtcggggcggggccgatgatattggtcggtaatacgggcttttgtccgcagcactttgagcaccattaaatcatcatcgcgaaaaaaatcggtaatttttttggttaagatcatttcttttggaatattgtaggtccggacggcggcatcattccaataaatgacttcctttttttcgtttacgatcgtaatcgcatcattttccgccgataataccgcctgcaaataagacagttcatttgccatttccgtcttcctcccctttgtcgtgtaaaggtattgtacattcgatttacaattgtgtaaatatattgtacatagaaaacggtttatttttttgcggatatagggaaacagggatgttccagaagttggcatgattcttgcatggtattaagccagaacgaggatgaaggaggttttttcattggtcttgccttttaaacatgaaccattaacggattttaaccagcctgaaaacgtacaggcgtttcaagcggcacttgaaaaagtgcgtgcggaactcgggaaggagtacccgcttgtaataaacggagaacggatttttacagaggataagctcgtatccgtcaatcctgcgaataaagaacaggttgtcgggaaagtttcgaaagcatcgaaagaactggttgacaaagctttcgaaggcgccaatgaggcatttcgcagctggcggaaaatggcacccgaagcgcgggcgaatgtgctgttcaaagccgctgcgattgcgcgccgccgcaaacatgagctgtcggcgtggcttgtgtttgatgccggcaagccgtggagccaggcggacggggatacggcggaaggaatcgactttttggaatactacggccgccagatgcttgagcttgcaaaggggcaggaaatggaacagcgtgaaaatgagcacaacacttatttttatcagccgatggggccgggggtgaccattccgccgtggaattttgctttcgccattgtttgcggcacgacggttgccccgcttgttgccgggaacccggttctgctgaagccttcggaaagcacgcctgttattgcatacaaactcgttgaaattttggaagaagcgggggttccgaaaggcgtgctccagtttgtgccgggcgatccggcagaaatcggcgattacctggtggatcatccgtctgcccattggattaactttacgggttccaaagcaacgggcctgcgcatttatgaacgggctgcgaaagtgcagaaggaccagcactttttaaaacgggtcgttgctgaaatgggcggcaaagatacgattattgtcgataaagaagcggatctcgatctcgccgcagatgcgattgtccagtcggcattcggtttttccggccagaaatgttcagcctgctcgcgggcagtcgtgcatgaagacgtgtatgaagaagtgctcgaaaaggcgatcgcccttgcgaaaaacgtaaccgtcggcgacccgtccgaagaaaatgtgtacatgggtgctgtcattaacgaaaagcagtttaacaagattaaaagttatatagaaatcggcaaagaagagggcaaactcgtctttggcggggaaacggatggtgaaaaaggatttttcgtttacccggcgatttttaaagatgtatatccaaaggcacggatcatgcaggaagaaattttcgggccggttgtcgcttttgcgaaaggaaaagattttgacgaactgcttgaaattgccaataatacggaatacggactgacaggcgccgtcatttcgaaaaacagggagcatttggaacgcgcccggtacgaattccatgtcggcaacctgtattttaaccggggatgcacggcggccgttgtcggttaccagccgttcggcggttttaaaatgtccggcaccgattcgaaagcgggcggcccggattatttgaagctgtttatggaagcaaaatctgtatcggaaatgttttaacgggaggaaaggcgtatggcgaatttgacgagagattttttcatcggcctttcaaacagcaggtttttaaataaaagtgcacaaaaatggggtttccggttcggtgctgaaaaatttgtggcggggacggatattgattccgtcacccggaccatccgggaaatgaatgcccgcgggatcagctgtaccgttgacaatctgggcgaattcgtatctgaaaaagcggaagcggagtcggcgaaacagcgcattctgcaaatgctggacaggattcatgaggagaacctggattgccatatctcggtgaaactgacccagctcgggcttgatattgaccgtgcgttctgcctgcaaaatatggaagacattttgaggcgtgcagcagcatacgggattttcagctctgaggagtaaaannnnnnnnnnnnnnnnnnnnnnnnnnnnnnnnnnnnnnnnnnnnnnnnnnnnnnnnnnnnnnnnnnnnnnnnnnnnnnnnnnnnnnnnnnnnnnnnnnnntgtggataagtcattttatcataaaacatctaaaaattgatgaatttactcttcagaactgcgggatttttatcaatattgacatggaagattacgcccattttcatgcgacaatagaggtgttgaaaaccctgcttgaatcgtatcaaaatgtcggaacagtcatccaggcgtatttgcgcaatgctgaagcggtcatggatgaactgaaagatgtccggctcagaattgtaaagggtgcctacaaagaaagcgagacagtcgcttttcagtcaaaagcggaaattgaccggaactatgtaaagcttgtaaaaaaacggctgctcggtgaggcgtatacgtccattgccacccatgaccattacctcattcgcgaactgggagcgtttattgaagaaaaccaaatcccgcacgaccggtttgagtttcagatgttgtacggatttcgccaggagatgcagtatgaactagcgaaaaaataccatttcacgacgtacatgccgttcggaaatgactggttcggctattatatgcggcgccttgccgaacgcccgcaaaatgtgaacctgattgtaaaggatgcactgtatacaaaagataataaattgaaaaaagaaccgcttctcaccgctgccctgaccgcttcgcttttcatgctgtggcgacgcaaaaggaagaggtaagaaaaaggccgctccgcaaagcaaccgtgccccgggcggccttttctatttcattttgttgatttgtatttctatcccggccgcgccgtgcctaacccggcatgggcaagctatcagtaaattgtgccacaacggtgaaaaccaatggcacggactcctctttttttattttcccgcacggttaaggactttccagtttggaccaacccaattatgcatattggacttctttcggttcaatttttgtaatcgaaaacatgttcattgcttccattacatcacgtatacgttcaatcgtagcgccatagtattcatttctttcatcccttgatacttgagacggggccactcccagtccgaagattatttttcaatagtttgaccgtatcggaatttgtcgaatgaatttagtggatttttggcgaactttatctatataatttatttaaaatattaaaacaaaaaagggggaataagctaatgaatagaaaaattaaaatctgtattttttcattcattgcatttgtaatgacaatagttggttatggaggtacgtctaaagcattggcagatgactctgaatcagaagtttcagcagtttatgatattaaaaatggcgatcccatagcggtttcaaaaaaccaatgggatgaatatcaagaggtgcaggattgggaggatgaacccgatgttccatcaacctatttaaaaaaagctgttgacatttccgaaagacgtgcatgtatgggtggctgggcttattccgcaacaaaacaaggatatgcattttataagatagtggagggaactcattaccttaatagaacaaaagacaatgtgactataacatcaacatttactggtacacattccaaaagctcaacagcaagtggaaaattaggtggtggttggaaacctgtaagtgctgaagtgggatataatgccgaccggacagtatcatggtctaaatctgattcagtgaaaataactgtccgtcctaaatatgaaggatggaatgattatggaacaaaacgtgataaatggtatggcacgtattactatctaagcaatagttgtgtgcaatcaaaaaacgttcagctcaccgtgtatattccgaaagtgaaagcagtcgttgcacacacaaaacatttatagatgaggggcaacgaccatgacacggccgatttttagacacgcttgtacaatttttgtgatgcttcccattctattaaacggttgttcagcaagtcattccggtaaccaggtgaagcatgaaatacagccaaaccacaccaaggccaaggagaatagccaagcggcgtcccttagtcttgaccaaatgatgatgactgaggcatcaaaagacgaacagcaaacaccgctcgataccgttacccatgtggttaaatggaagttttcagatgaaaaagatgttgttccttctaagaagaatatattatgggaaacccatttgggaagcgaagcggtcgtagcaaccaaagtaccaaaacttaaagattcaagattgaatctgtttgccctgtcctttcatgacggtaagtggggaataaaaaacgtgacagatgcccctattgatcgtttggaagatcatgttaaaggtttaacgcttcctatgcaaaaatatgctgtaatcacctcagattttgatggaaaatcgatatggaacatcacagacgggaaaagaacagtcatgattgcactgtatccccaattttccttttccatgcctgaaggaacgaaaaccattccgtttaagggcgatgaggcttttgtaaatactcgatcgaaaacgcaatccttgttttattattttgaccaggaaaaactgatttggatctatggtgatttgtctgaaagcgaaatcataaaattggctaattcactgccaagtgctggatctcccagttttcccgaagcatcatcatagacccaaaccgggaatgccatctgagaaaatgtgatgcagtggttttttatgatcctcgattaagaggggagggcttggaagtctgagggccatatctttctgttggctaatttttcacctgtttataaatttgtgtctcagaatataaaaaaaccccggaaccagagcggtttcggggttttacacattacctggaatagaactcaacgattaacgattcgttaatttcagccggcagttccgagcgttcagggaggcggctgtaagtcccttcaagcttgtctgcatcaaaagaaaggtaatccggaacgaatgtcgttgtttcgatcgcttctttgataacatcaaggttgcgggatttttcgcgtacgccgatcgtttgccccggttctacacggtaagacgggatatcgacgcgtttgccgtcaacaagaatatgcccgtggtttacgagctggcgtgcttggcggcgtgtgcgagccaaaccgagacggtaaacaaggttatcaaggcgtgattccaaaagaaccatgaaattttcaccgtgtttcccttgcattttgccagctttcaggaaagtgttgtggaattggcgttcatttaagccgtacatatggcgaagcttttgtttttcctgtaattgcaagccgtattcagacaattttctgcgctgattcgggccgtgctgcccgggtgcataagggcgcttctccaattcttttccggtaccgcttaaagaaatcccgagacggcgggacaatttccagcttggacctgtataacgagccatgaaagactcctcctttgtttttattttgttgtaaaataaaaacagatatcatggacacttcttcatgcgtattttgttttcatgtaccatcgccccagcagcagagggttacacgatacaccttgcattcaggcaaggaacaaaatacaaacacaaagccgtccaataaggctgcattattttacacaacgttgattatatgttttcagagaaaaaaagtcaacaacaaatgcaaatcgggatgccgttgcaaatcgggatgccatgccaaaaaaattttacataccggttttgccgggttcataacaggacttaagatacaacacatactgtatatcggtcgagcgggctgtacatttatagtacttttgcattataatggtattaatttgaccggtttttacatttttacgtctcccgtgcggttttttgttttaaaattcttcattttcaaggttcacactttttagtgctttttttcgcttttatacggaaacagggtcagggtgattaggaaatggaaaaaaagaaagaaaatcatttaatcctatattataagtcccgtttactggatttaatgaatcttgaggcagcaagcagcctggatgactgggtggcggtcgtggcggatgtgctcagcgccgatcatatcgtatattataagccggacagcgaaaacacgaagttctacaaaatatgcagcttttataatcctttccggcatgacgtcgaactcgtcgtgccctccggaaaaatcaaagctttaaaaacagcctcccaggttgtcacaaatgggaaactgaaaaaggatccttatttaaaacagtttaacattgccttttttattccggaaaaaaacatggaggacggctgcctgcttctttccattccaaacaggctgttcggggagcttgatgctagtatagtttctcatgaaaaatatggcatgagatcaaaattaaatttcacttattggtgtccaaaatattgacttaaatccagctgtctgacgcggatctgcaggcgtttgtcagggaaagccggaacttcctgcagctgaagtatgagttgtctgttgtcgaagccgacagaaagcgttacatcgaattattccaagtgaccggaaaattccattcttccatggatacggatacgatccttgcagaaatcatttacacgctgaaaaggctgtacccggtttttgactacaccttaatgctgtcggacgattaccaccacaatcttgatttgccgatcaagtcgctgcaatatgatgcggtcgacgaaatggcgctcgaatcatatgtaaacggccaggtccaccttgccacggtatggcggacaaacgaaacgatgctttatgcgccgctaaggggaaagcagggcgtgtatggcgtgctgcaggtcatcacttttaccaactatgaatttaatcgcagcgatttggaatttatcagcctgctggccaatacggcgggaagtgcgcttgaaaatgccaagctgtaccagcagtcgatgcagtccattgaagaactccgcctgatcaattcggtttcccgccagttaaataaaagcgcgaatttaaaagaaaccgtcgattttttaatgaaacagatctccagttcatttgatacccaggcaatcgggttcgtgatgatggagaatgggaaaatggacctacttgaaggcagcagccccatttttgaagaaaaggaaggcgcccgttatcttgaatttgcaaaccgttcgtttgccgaaaagaaagaatccctgtttatcagcaatttaaaccggcgctttcccggcaggaactatcgtttttcttcgctgatggctgtcccgattatccaggaagatgatttaaaggggttttgccttgttcttcatgaagcgccttaccatttttctttcgacaggttcaaactttttcagtcgcttatttatcagtcgggcatggccttaaccaactccatgcttcgcgagcggcttgaaaaaatggtgattaccgatcatctcacccagctgtttgccaaaaattacttgaacagccggatggaaacttctattggtgaagatgagcagggcacgctgattttgctcgatattgatgactttaaaaaagtcaatgatacatacggccatcaaaccggggatgaaattttgatccaggttgcaaagctgatcaaagaaaacattcgttcaaccgatatcggagcaagatggggcggagaggaaatggcgatttatcttcccggcgtgccgcttcaaacaggggtgcaggtcgccaaaagggtgcttgcggctgttcggaaaaatacaaatcctccggttaccatttcctgcggggtgtcgtactggaataaagagatgaatgaaacggcggagtccctctttaacagggcggacgccggattgtaccatgcgaaaagcctcgggaaaaaccaggttgtcatcagcgatatggaaatgaaatccaattagggcgcactgcagctgatttcttttgtcagccgcctttaaaaccccccttgccggatccggcaaggggggcattttttatgcatttcgttattgttgtaatatctgcttcaggccacaaaccccggctgcctgtgccaagttcgtccggcctgcggattttgggtttgggcatggggctttgccagccagtatcttttgccgccctgatttttcagcctgcgaaaccagccttacagcactttttccagcgcagcggcaaaagctgccagccctgcctcatcttctgcatcaaaacgatttttttccgggctgtcgatatccaaaacgccgaccacttccccgtttttcataagcggtacgacaatttcagactgggaagcggcgtcacaggcaatatggcctgaaaactgctggacatcggcgacccggagcacccgtttttctttccaggctgtcccgcacacccctttcccatacggaagccgcacacaggccggcaaaccctggaacggcccgaggacgagttcatccccggatgcgaaataaaacccaacccagttcacccggtcaagaaactggtttaacagcgctgtagcattgcttaaattggcaattttgtccggttcgccttctgtgagcgcgatcagctgttttacgacaagatcatacttttctttcttcgtaccctgggcattttctgcatgaaacatcgccatcatccttacatcagcaaattttttaaaaacggggcgggattttgtcggaaagtttttaaaggaaccccgacccggcatatggaatagtacggaatagaatatttttaacacaaaaggggaagcccggcaagcaaaaaagaggaaagggtggaacaaatggacggaaacagcagcgaaacaaaagaaaaaatattcaatacggcgattgctttatttcatacgaagggctataaaggaacgacgatcagggcgattgcggcttccgcaaaagtcaattcggccaatatttcctattactttaacggcaagcaggggttgctggaggcgtgctttatccgcttttttgaaccgtatattgcctgccttgaagaagaagtgcaaaatctttcggaagaaggattaaaacgggcggccttccgcatcctgcactttcaaagcgaaaaccacctgctgtccagatttgtatggcgggaagtcaccgttgattcgcaaattgtccgcgaaattttgtccacttatttcatgaaagagcgttatttattgaaaaaacttgccaaggcctggtgcgggcccggaatccaggcgggcaaactgaactttctcatgattcagctgaaaagcatgctgtcgatgccgtatttaaacagccagtacattcgggaagtatggggcatacagccggaagaaccgtattttgccgaaaaatacggcaaatcggttgccgaatggctggacagcatccggcaaaacgcgggggcgcagccggaaccgctgctgcttgaaaccgctttttaatgtgccggcccgggccggctgtttttaaatgccggcagctttccgaaaaagcccgccgccgtgcaaaaaataagcgccggctttttttattttgggtgcggaaaaaaccttccccaaaatgaatcgaaaaatctcgaatttcatagtcaaatattgtcattacatggtatcatagaataaaaataaacatacatgcctatggatatcgggaaggattgctccggtattcatacatacataatgagcggatattaaggtttgatttgtggacgaacgggaggctttcaagtttatgatgtatggcatcattggcgctattcttttgttgctcgttttattgacttgcggtttttttatcaggaggcagttttacaaagagattgacaagcttgaagcatggaaaattgaaatcatgaaccggcctgtcactgaagagctgggaaaagtcaaacggctcaatatgggcggggaggcggaaagtttatttgaaggctggcgcaaagactgggaggaccttttaaacgaggaactgccggcagtggaagataagctctttgaaatcgaggagcacaccgacaaataccgtttcaaaaaggcgaaagaagtacaggcggaagcagaggcgattcttcaaaatgcggaacaaaaaataaaagatatactggacggcgtcaatgaactgatggatgccgagaaagaatcccggaaagaagtggaagaactcgggaaaatcttcaaagacttgaagaaacagcttctgacacggcgccatacatacggaaaaggcattaaaagccttgacttgagagtggacggcctggcggagaaatttgcccgttaccatgaactgacggaagccgggaactacttggaggcaaagaaattagccgatgaactgaaagcagaaacagaaacgttgcaggaggatgccgggaaaattccggatttgctggcggaaacggaatcgcttttgccgatgcagtttagagaattgaaagagggctacaaagaaatggctgcacaaggttttgcgctcgatcacctgcagtttgatgaagaaatgaaggaacttacagagaagctttcggcttaccggaaacaacttgaacaggctgacacagcggatgtcgaggaaggcatccgggaaatcaaggaaagaatagaaacgatttacgatattttagaaaaagaagcgtacgcgaaaaactatgtgctcaagcatttccgtgaagtgaaggatatcctggatgaagtacgggaagaaaacaagcgcctcaaaacagaaacagaatccgtgcaaaagacataccagctgcatgaggaaaacatggccgttccagctgaactcgagaaacaattggagaaactggccgcgcgtttggcggtccttgaagtaaaaattcctgaaaacgaaacgatttattccgtgttaagcgaacagctcaaagaaatggaagggcagattgaaaaactgcgggatgaccagaagacgtttaacgaatttttgcagaacctgcggaaagaagaaatggaagcacgcgcgaagatcatgggcttgaagcggacaatccaggatatgcgccgccttgtcgaaagaagcaatattcccgggctgccggactcgtaccgcaccctgtacgaagcagcctggaatgcgattcgtgacactgccgaaagcctccatgccacgccgctaaacatggaaaaggtcaaccgccatctgctggaggcggaacaggcagtcggaaactttgaaaaaagcacgaaagctttaatggaaaatgtgcagcttgctgaaaaagtgattcaatacggcaaccgttaccgcgctaaatataagaaagtggcggacgggctagagcgcgcagaagtggctttccggcgctatgattatgagaaggcgcttgaagaagccgcaacgacagtggaagcggtggagcccggcgcattgaaaaaaattgaaaaaatgctggaaactgaagaattactttgaagcaaacggaaaaaatacggagcgctccccgttttttttcgtttgcttttttctgcgcctttcagccggcaggcaggcctttcatgcggctgatgccaaacagacgcactcgttttttggcgcctggttctttaacctggtaaacaggcacgggtgaagacctctgagccttaagcaacttattttctgtctgaacaagttaacgcacatgggcgaacgtgcatcctttcgacaattcgggcaggatctcctcgaccgaacaagttaacgcgcatgggcgaacgtgcagggccattgccgccccatcctggagatgaaagaccagtgccgcgaaagaagcggcgcggagaccgggatgggcggcgcataacgggagtatatcggttgtaggttcggtatccggcatggtatattaggcaatgatacaggtttggatccaattttatgccaacagagggtgttcaaatgatttactttgacaacagtgccacaacaaggccttatccggaagtgctggatgcttttgtgaaaacatcggaaaactattttgcaaatccctcttccctgcatagcctcggcgcgcgtacagagaaacttctcacgcaggcaagacggcaaattgcgagtcttctcggcgcagacgagaacgaaatttttttcacatccggcggcacggaaggcaataatctggcgattaaagggacagccctcgagtaccgttcaagggggcgccatatcattacgacggctgttgaacatgcatctgtttttgaaacatgccggcagctggaagaatggggctttcgcgtcacgtatttgccggttgacaggagcggaagaatcaaactggacgatttaaaacaggccatcacggatgaaacgattcttgtttccgtgatgcatgtgaataacgaagtaggaacagtgcagccggtggaagaaatcgggcggcttctcaaaacttacccgaaaatcctgtttcatacagacgatgtccagggctgcggaaaagttccgctttccctgcatgatgccggcatcgatctttgtacggtttccgcgcataaatgccatggcttaaagggaaccgggatattatataaacgggcaaatctccgcctgtcaccgcttttaaccggcgggcaccaggagaggggcttgcgcagcggcaccgaaaatacaggcggaatcgttgcagccggaaaagcgctccgcctggtccatgaaaaatttgaagccggggcggcagaaagaacggcccgtatccgggatgccctgatcgaaaaacttcaggagatgcctgctgtgacagtctataccaatccggctgtttcagcgccgcacatcctgaatttttccgtccgcggcatccgcggcgaagtgctcgtgcatgcgcttgaagaggaaggcacttatatttccacaacaagcgcctgctcttcaaaaacgcgggaactgagccgcacgcttcttgccatgggggtttccgaagacgaagccgaatgggcggtgcgcgtgagcctttcttatgaaaatacaatggaggaagcggaacgttttatccgcatattaaggcaaacaatcacaaatttacaagaagtgttggggagaaatcaatgaactatgaccgcattttaatccgttatggggaactttcgacaaaagggcataaccgccagttttttatccggcatttaaaagacaatgtcaaaaaagcgctcaggccttttggcggcattgaagtccaggcgctgtacgaccgcatgtacgtgctcttgcatggcgcagacggcgggcaagtcatcgatattttaaaatcaatcttcgggatccagtcattcagcccggccgtccgcacccggaaacagctcgaagacatcgagcaggcggggctcgaactcgtccggcaaaactttgcgaaaggcaaaaccttcaaagtgtcggcccgccgcggcgataaaacatttgaatacgattcgaatgatttgaaccatctcgtcggcggctatattttaaagcagctggacggcattcaagtcaatgtaaaacagccggatatcgagctgcttgtggatgtccggaaaaacggcgtctatttgtccactgaagtgataaaaggatccggcgggcttcctgtcggtgcgtccggaaaagcgatgctcatgctttcgggcggtattgacagcccggttgcaggatacctcgcgatgaaacgcggcgtgaaagtggaagcggtccatttccacagcccgccgtttacaagcccgcgtgcaaagcaaaaagcgcttgaccttgcgcaaaaaatttccgcctacagcggctccatgaaagtgcatattgtcccctttacaaaaatccaggagacgatccataaaggggttccggaaggctattcgatgaccgtgcaaagaagggtaatgcttgagattaccgaccggctccgtaaaatccataacgggcttgcgattgtaaccggcgaaagcctcggccaggttgccagccagacgctcgacagcatggttgcaatcaatgacgtaacaacgacaccggtgttgcggccgcttgtttcaatggataagctggacattattgatattgcccaaaaaatcggcacttacgacatctcaagtcttccgtatgaagactgctgcacgattttcacgccgccttcgccgaaaacgcggccgaaactcgagcttgcgcgtctttacgaaagccgcctcgaactggaaccattgattgaagaagcggtgcaaaatacggaggacgtctttattacaccaaatgaaacggcgcaggaagaagacttttccgggctgttataaaatccagtaactggcagcaccgccaataaacttacaacatgatgccatgtgtttatgcgcaatctatactcacaaggaggtgagacacatggcacaaagcaacaacagcaaccaattgcttgtaagcggtgctgaacaagcgctggaccaaatgaaatacgaaatcgctcaggaatttggcgtaaaccttggtgctgatacgacttcccgcgcaaacgggtctgtcggcggcgaaatcacgaaacgccttgtttcgatggctgaacaacaattaggcggtacttcccgataactgaatgaagaatggataaagaagcgggcctgaagcggggtccgcttcttcttgtttttggggtaaatctgtatcatatttttttaatatcaggtataataatgaggtactaaaaaattctggaggcgattcgcttgcgtcgtagtgacctgattgcgccacaaacatacaatatagccgaagaaattgagaaatatgcccgggacccgcacaaggttgcgctgatttgggaagacaaagaaggcatgcacagagaagtcacatataaagaattaattgaaaatgcaaaccggaccggccatgtctttttggaaaacgggctgaaaaagggagatatcatacttgtcatggttccgcgcattgtagaagcatacgaagtgtatctcgctgcaatgaaatgcggcatcgtccttttgccggcctcggaaatgctgcggacaaaagacctcgactaccgcatcgaagcaggggatgtaaaaggcgttgtcgcccattattcatgcaccgcacagtttaaagatgtccgcggcattgaaaatttgaaaaaatttgtaatcggagaaccggaaccgggatgggcgtttctggatgaaaagaaaaaagcagcgccttgtgaactggaaatcgccaaaacgtcaaaagatgatattgcaattttgtcttatacttccgggacaactggcaatccgaaaggtgtcatccatacgcacagctggggatatgcccatttgcgcacggctgccccgaactggcttggcattcaggaaggcgaccgcgtttgggcgacggccgcaccgggatggcaaaaatgggtatggagcccgttcctttccgttctcggttcaggtgcaatcgggtttgtttacaacggccgttttgatcctaaaaaatatttgtcccttttggatgaatatgaaatcaatgtgctctgctgcacaccgactgaataccgtttaatggcaaaagtggatgacttgtcccattatcatctgaaaagcttaaggagcgcggtctcagccggggaaccgctgaaccgcgaagtcatggatgttttccaaaaccatttcggcctcacgatccgcgacggttacggccagacggaaagcacgctgctcgtcggcttttcccttgataccccgttgcgaccgggttcaatgggcaaaccgttccccggaaatgaagtcgaaatcgtaaatgatgacgggaagccgtgcaaaccgggcgaaaccggcgacattgccgtccatagagacacgcctgcgctttttaaaggctattataaagagccggagcgcacggccaagcaataccgcggcgattacttcattacaggggatagggcaagaaaagatgaggacggttatttctggtttgaaggcaggcgggatgatatcattatttcttccggctatacgatcgggccgtttgaggtcgaagatgccctcgtcaagcatccgtatgtgaaagaatgtgccgttgtcgcaagtccgcacgaaatccgcggcagcattgtgaaagcttttgtcgttttaaaagatggcatcagtgagaatttgccagggcttgtaaaagaactgcaaaaccacgtaaaacaactgaccgcgccgtacaaatacccgcgtgcgattgaatttatcaaggaattgccaaaaacggcctccggcaaaatccgccgtgtcgagctcaggcagcaggaatggaatagataagaaacaaaaagccggacatttttttgaaaaaatgtccggctttttgttttaaagtcccggatcttcaagtagaataaaagaaaaacaaagaaatggaaggatgaaatgttggcatgaacaaaaaaagatggggagcgcttgctttggcaggcgggctgttcgtcgtttccattattgtgaatctggcgagcatggcggcatcaaccaacttttccaaaatctttaaagagacggtggaagcgggggaaggggatgtttccgaaaatgtattgcaggatgggaatgaatcaaagaaaatcgtcgttttgaatgtgaacgggacgattcaggataccggcgcgtcaccatccctgctggataccggtgaatataaccatcaaagttttttggaagaactggatgaggcgaaaaaagaccgcgatgtaaaaggcatcattttacatataaattcgccgggcggcggggtggccgagtcggcggaaatccatcaccggctgatggaaataaaaaaagatacgaagaagaaaatttatgtgtccatggggccgacttgcgcatccggtgcatattacatttcaacgccggccgataaaatatttgcaagcccggaaaccttgaccgggtcgctcggagttattatggaaagcgtgaactacgggaaacttgccaaaaaatacggcatcgattttccggtgattaaaagcgggcagtataaagacattatgagcccttaccgggacatgacgaaaagcgaaaaagaaatgatgcagaaaatggtcaacaattcgtataacggtttcgtcaatgtgatttccaaagggcgccacattccgaaagaagaggtgcgcaaaattgcggacgggcgtgtctatgatggcaggcaggcactcaatttgcatctgattgataaatacggctacctggatgacaccatttcggcaatgaaaaaagaccttcatctcgggaaagcgcaggttgtggaatatgaaacaagcggcgggctcgattcgctgttttctgcttcagtgcaaaaaatgctcggcaaagaagcagaaatgacagggcttgcgcatttgttgacgcaatcgaacgcaccacgcccgatgtacctgtattccggggctgaataggggggagcatcatgaattcaaacgaaaaccatattcctgaaacattgacaaaagcgccggaacaaatatccggaagtttatcaggagcccgttatgccgggttctggatacggttttgggcttatttgcttgacctgcttgttgtccaaagtgtgaaatggctggtcatccatcccattttccggctttccggactgtcccttacagacgaaaaaatttactcgccgattacgatcgcatcagcccttgtattttacggttatttcgttctaatgacgaagtttttcggccagacgcttgggaaaatggtgtttggcctcagggttgtaccgctgaaccatcccgggccgctgaaatggagcaccgttttattccgggaatggatcgtccgttatgtttgtgtcaagattgcggtcatctatattgtcgttgcatttacgccgaaaaaacaaggggtgcacgatttgtttgccgatacggccgtcattcatgaacggtcccatgaaccggtctatccttattatgaacctgcttaagggcaggtttatttttttgccctgttggcgataatggttgcaaaaaaggctgatgatggaaatgatatggtggctatccgcgtttttcgcacttgccgcaatcactgcgattgtatggttctcttccctgtccgtccttattgaatacgggcaccgcttagatgatgataaaatttttatccaaatcagggtgtggggcatcatctgctataccgtgaaaatcccggcagtgaaagtggaccggaaaaaacccggtgtcgtatatgaaaaagagacaaaacatgcagagcaggaaaggaacattacgccggatgtcctcgaacagcggattgaagatgtgaaaaaaattgcggagcgcgtcatcggtttaaaggcgattgcaggcaagttcatccgcaatgtccagttaagaaaattcgaatggcatacagcaatcgggctgcatgatgccgcgtggacgggaattgtcgccgggagcatctgggcggtgaaaggggggatcttaagcctcattaccacacatctgcgtgtaaaaacggatcctgtcctttccgttacgccctttttccagtacccgatttccgaaacacagttaaaatgtatggtgaaaatccagatcgggaaagctataatagccgcatttaaaatgctgaaatactggcggggaggaaaagcggaaatcgcgcttacaccggtttctgagccggaaaacggccggcatgcttaaatcccggcagaaacaaatgacaggaggaaacaacaatgggttcacatccgattgaaggcctgatgacggccgcaatggaaaatttaaaagaaatgattgacgtaaatacgattatcggggatccggtggaaacgccggatggaagcgtcattttaaccgtatccaaagtcggtttcgggtttgcggcaggcggcagccaatttaacgggccatccggatccggcggcagcggcgaatcccgcccggcagagctgcctttcgggggcggcagcggcggcggcgtctcgattatgcccattgcctttttggttgttggcgcacaaggcgtgaaaatgctgcatctggaccaaaacacgcatctgattgaaaaaattatggacgtcgcaccgggcgttgtcgaaaaaatccagagcatgctgaaacaaaacggccaaaatggcgggcaacagccggccaaccagcaaaaacaggatcttgatttttaaaaacccgcatgattcgcgggttttaaattggaaatttttttcgttgtccagtatgataaggtatgagcacagctgaaatacggggattgtaagccccggcaaaaataaggagggtatttcatggcttcggttacatttaaagggaatccagtcacattggaagggacacaagtaaaagttggcgataaggcaccggactttacggttctggataatgacttgaatgaggtgacactttcggatacaaaaggcggcgtccgcatcttcagcgttgtcccgtcgattgataccggtgtttgcgatgcacagacgcgccgttttaacgaagaagcagcaaaactcgggaaagaagtcaacgtttatactttctcctgtgacctgccttttgctcaaaaaagatggtgtgcggcatccgggctcgaccatgtaaaagtgttgtccgaccaccgcgacctgtcattcggcaaagcttacggggttgtgatgaaagaacttcgcctgcttgcccgcgccgtatttgtcgtggattccaatgatacggttacatatgtggaatatgtaagcgaaggcaccaaccatcctgactacgaaaaagcattgcaagccgcaaaagatgcatcgtaaaacaggcattgaatagcgccgggaaacgcgaagagcgcttgctatactgcgataaaatccccgatctccatcggggattttatatggaagaagaatatgaaggaggagaatgaatgtcggcctctcctgttgaaaccctttttaccgtttttaacgaatccgcgcaaatcttggaaaatcgcctctctgtcccgtatttggaagccgtggcgatgaccggggaaaatttattcaccggaagcatccgccaaaatgggattgatgcgcgcgatgaaaaacgccttgaaaacatatacggaacggtccgcctcggggactttacccgcgagcaaatacggaaagcctaccagctcgccatcctgaaggggatgaaagcaaacgtccaggcaaaccaccaaatgacgccggattcgatcggactgctgatgagctattttatcggcaagtttgcagaagataccagtgcgttttcgattttggaccctgcggtgggcaccggcaatttgcttttgaccattttgaaccagctcagcgggaaaaacatcactgcttacggcgtggatatcgatgatgttttggtccggctcgcatacacgggggcgaaccttctgcaccatgaaatcgaactgtttacgcaggatgccctgtcccaattgttcattgaccctgtcgatatcgttgtttgcgatttgccggtcggatactacccgaatgatgcgggcgccgcagattacaagctgaaggcagatgaagggcattcgtacgcccatcatttgtttatcgagcagagcctgagagcggcgcgcccgggcggatttttattttttctcatcccaaacggattatttgaaacaaaagaagccccgaaacttcgccggtttttaaaagaagaggcggatatccaggcgattttgcaattgccgatgaccatcttcaaaaacgaacaggctgccaaaagcatttttgtcatccgcaagaaagcggaaggcgtgaaggcgccggaacaagtgctgctggcgtcgctcccgtccctgtccaacgagggggcgctaaggcagctgatggcaaaaatggacgcctggtgcaaagaaaatatccaaagcggcaaaatttgacgaattgggaaaaatgggggccggaaagcaggaaattgcgttccggcccccatttgtttgtgtttttatggtatcattttatatgttcccgggagacgaaaccaaaaaaccggttgaaaaaaaccggatagaatggcaaaatgagaaaatgagatcgctattttaaaaaaataaaagggttcatttgattttgcgaagggaagacgagcaatggcaaaaattatggcaattaatgcggggagctcctccttaaaatttcaattatttgatatgccgaatgaaagcgttataacgaaaggcctgattgaacggatcgggttaaacgatgctttattttccattacggtaaacggggacagggtgaaggaaattaccgatattccgaaccatgaagttgccgtgcagtttttattaaaaaaattaacggaaaccggtattatccggtctttggatgaaatagaaggcgtgggccaccgggttgtgcacggcggcgaaatattcaatgattctgctgtcgtcaatgaccaggtgctcgcgcaaattgaagatttggcggaactcgcgccgcttcataaccgggcgaacgcaacggggatccgggcgttccgtgctgtgctgccggatgtggttcaagtggccgtgtttgataccgctttccaccaaacgatgccggaaagtgctttcctatacagcctaccctatgaatactacgaaaaatatcggatccgcaaatacgggtttcacggcacttcccataaatatgtagcgatgcgcgccgctgagctgctcggcaggccgcttaaacagctgcgcctgatttcatgccatttgggcaacggggcaagcattgcggcgatccagggcggccggtcaatcgatacgtccatgggctttacgccattggccggtgtgacgatgggcacgcgttccggcaatatcgatcctgcgctgattccgtttattatggagaagacaggcaaaaccgcggaagaagtgctcgaagtgttaaacaaagaatccgggcttcttggcatttcgggcgtttccagcgatttgcgcgatatccaggtggcggcagaactcgagcggaacaagcgggctgaactggcgcttgacatttttgcaagccgcatccataaatacatcgggtcgtatgcggcaaaaatggccggcgtggatgcgattatttttacagccggcatcggggaaaacagcgatgccatccgcgcaagaattttaacgggactggaatttatgggcatttactgggatccgaccctgaaccagatccgtgggaccgaagcgtttatcaattatccgcattcccctgtaaaagtgctcgttatccctactaatgaagagctgatgatcgcacgcgatgttgtccggctgtcttcatgaccgcggaagccggccggcgccggcagcttgctttctctgctgcccgtgcccgaataaatcgtttcaggaagcgctttggcatagcataaacggacagccgtgcatggaatttatgttataatggctgtaaaacagagtttgggagcggatcgaaaatggcggaatggacagacagggaaaaaatagtcctggatgaaatcaacgactgggcggagaagctgttagcggccggaaaagaagggggcgggcgcaagcaaaaactggatgcgctctttgccaattttccggatgaggcgctggaaaatatccatgaaaaaatagatgccgttttgtttcaaatctgttcatttgccgatgaaaatctgccttacgggcatgagatcgaaaaaatacttgctgcggggcgtctctttgacagttctgtcgcaacgattcccgatatgaggaaacttaccatcgaccaggcagggtttattgcggcacggcagcaggcaaaataccgccgtctctcactcttcgaaggggcattgagcggaaccgggaaagccgtttttgccgcggcggacccgtttttcctgctggctgtgaatctccgggcggtccagctcaccggtgcagcttacggatttgaaacaaaatcgcccggcggactcgtggcggcgctgaaaatcgtgctgatggccgctgccccggacatggtgaaatatgcgctctgggaagaattgatggatgagctggaagcgcgcggaaccggcttctatgcagggaatgaaaagttattccaccgctatttgtggccgggggccatcgggcatgccggtaagctcgcttttctggcgctgctccggccgaaaaagcggggagaaaacagctgggccgggatggccatcggggctgctacaaactactatttttctaaaaaagtttgtgaaattgcagagaaatattatcaataccggtttttaacagaaaaaagcggccgttaaaaaaccagcccgtaaaaggctggtttttgcttaattttccgctttgccttcttcttccttaggcgttctcacaacgagcacatcgcagggggaagtgcggacaatatgctcggaaacgcttccgattaggagcctttccactgcatttaaaccggttgcgccgcacacaattaaatccgcatgcacttttggcgcgacattttttgtgatttgaagtttcggagagccgagctggatgatcgtctggactttgatccctttttccgcggcgcggtctttgtaattgcttaacagctcatccccgaatttttcgttctgctcatacaatgtcgaatcaatcggcgtcaaagtggcgagcgcccggttatcgacgacatggacaaccgataattccgccttgttccgtttggcgatttcaaccgcttttgtaaaagcccaatcggcttctttggagccatctaccgctactaaaatattccggtattgtgtgcccatcttactcatctcctttataaactgcctgcctttcatgtctattttactagaattttccgggtttgtgtgtgaaaaatgaaaaaacccggtgatccatttttcaatcaaaacgggcggaagcaggcaaaaatgaaaacggtatcccgttccttgccgcggataagaaatttgcaaaaaacataggaaaaagagggaatttttgctacaataaagatgtttgggaaagttttcaaccgtttgatatgttttcttacaataataagaaagcggatggcaaaacacgaacacgaggaggaactttctatgcgaattggcgtgccaaaagaaattaaaaacaatgaaagccgtgtggccatgaccccggccggcgtggtgaccctgtccaaagcggggcatgaagtttttattgaaaagaatgcgggccttgcatcggggttcagtgacgaagaatatgccaaagccggtgcccggatcgtagagactgctgaagatgcgtggtcttttgaaatggtcatgaaagtgaaagagccgatcgaaagcgagtaccgctatttccgtgaaggcatgattttatttacatatttgcatcttgccgcagcacccgggcttacggaagaactgctgaaaaagaaagtgaccggcattgcttatgaaaccgtgcagcttgccaaccgttcgctgccgcttttgacgccgatgagcgaagtggcgggcagaatggcgccgcagattggcgcacagtttcttgaaaaaaataacggtggaaaagggatcctgctttccggcgtgccgggcgtcaaaagaggcaggattacaattatcggcggcggggttgccggaacgaatgcggcaaaagtcgcgatcggccttggggcggatgtaacggttgtcgaattgaatccggaccgcctgcgccagcttgatgacattttcggcagcaaaattacaaccctgatctcgaatccgtacaatattgcggaagcggtgagtgatgcggaccttgtgatcggatccgttctgatcccgggtgcaaaagcgccaaaactggtgacggaagagatgatcaaagcgatgcagccgggctctgttgtcgtggatattgcgattgaccaaggcggcagttttgaaacgacagaccgttccacgacccatgatgatccggtttatatcaaacatgatgtcgtccattatgcagtcgccaatattccgggcgcggttgcccgcacatcgacgattgccctcaccaatgtgacggtgccgtacgcggcggaaattgccaataaggggtatgagaaagcagttttggaaaatgaggcgctgttaaaaggagtcaatacgctgaacgggcatgtaacgtatcaagcggtggccgattcgctcgggctctcctataccgatgtgaaaaagcttttaaaataagttttcaaaagccggctgcaagaattgccggaacaaaaaaagaagcacaagcagcatgaaagctgcttgtgcttcttttttaaacatactgcaaggctttcgggtactttgtcagcacttcggcacccgtttttgtaatgcagacgtcatcttcaatccggacgccggcaactcccggcacgtatattcccggttcgatcgtgaagaccatcccttcttcaagcaccagctcattcgtatgggtgacagaaggatattcgtggatgctgatgccgagcccgtggccgagccggtgtgtaaaatattcgccgtatcccgcgtcttcaatgatgcggcgtgcaatcaagtcgagctcttttgcctttacccccggttttgctgccgccacggctgcttcttccgcttttaataccgtttcgtaaatccgggttttttcttcgctgagccccccgaatgcgaccgtccttgtaatatcggaacagtagccttggtgcacaacgcccaggtcaaacaggacaaaattccctttttcgattttgtcaaggccgggcgcgccgtgcggggaagccgccttcgcacctgagaggacggtggtggcgaagctcatttccgaaatccctttttctttcattgcaaattcaatggcagccacgatttcaagttcggtttttccttcttgaatttcgcggatgcccgtttcaacggccagatcggcaaaagcggccgcttcccttaaaatcttctgttcctgctcatctttgatgaggcgcatcgtgcgcaatttttcttcagcagcggtaaagcgggcgccgccaaaccgttctttcagcgcttcgaaccgttccacgttcaaatgctctttttcaaccgcaaatgtatcgacattcccgattcgcccgcgtatttctccagccaccaaatcccacgggttatccgtatcccggataccgagaatgtcatattcccagccggcttttttcgcatcatacgcctccattgccgggcagacgagaaacggctctttttcctggaatacgcaaatgccgagcagcctttcgtgcgggtcgctgcggtaaccgctcaaataaaagacattgtcaggcgacgtaataaaagcagcatcggtcttttccgctttcagccacgccgccacacttgccaaacgcttattcatcccattcatctccttatcagacgttactagcatagcaaaaaataggttaagatgctacatgtagagcatcaggcaggattacggggcaaagaaataatataatgaaagtggccactgaagccgtacaaattttaaaaggagtgatcagctgatgaaagtttcttttcacggccattcaattgtaaaagtggaaacgggcggcaaaacgatactctttgatccgtttattaccggcaacagccagacagacctgaaagtggaggaagaaagcccggatgtgattattctcacacatgggcacggcgatcatatcggggatacagaggcgcttgcccgcaaaaagaatgcgcttattattgccaataatgaaattgcaaattactttgcctggaaagggctgaatacgcatccgctccatatcggcggctcgtaccagttcgatttcggaaaagtaaagcttacccaggcgttccacggctcggcggttgtggatgatgaaaagaaagaaatcgtttacctcgggatgccgacgggcgttttgctgatggcagaagggaaaacaatctaccacgctggcgataccgggctgttctcggatatgaaattaatcggcgaacgccacccgattgatctcgcatttctgccgatcggcgacaacttcacgatggggccggaagacgcagcagtggcggcaacatttctgcaggcgaaaacggtcgtgccgatccattacaatacgttcccgctcattcagcaggatccgcagaaatttatcgatttgctcgacggcgtaaacggcaaagtcatgaaagccggagatgcgatcgaattgtaacagaggcccaggattggcaaatacaggggttcgcttgcagccggcatgtgctgaaaaagtgccggccgcacttccccttttccattatttaaagggtatgtgtaaaattttacnnnnnnnnnnnnnnnnnnnnnnnnnnnnnnnnnnnnnnnnnnnnnnnnnnnnnnnnnnnnnnnnnnnnnnnnnnnnnnnnnnnnnnnnnnnnnnnnnnnnaaaacttgacacatacatttaaaggggcctgattgcccttttcccctttttccatctataatagaaatatacagattgctccatacatattccttgaaagcgtacaaaaacggaaagaaggtgaaaaaatggcgacaaaacacgaacagattttacaatatatcaatgagctgccggtcggggaaaaaatatcagtccgccagattgcaaaggcgctgaatgtcagtgaagggaccgcttaccgcgccattaaagatgctgaaataaaagggtatgtcagcacgattgaacgggtcggcaccatccggattgagcagaagaaaaaagaaaatatcgaaaagctgacatttttggaagtcgtcaatattatcgacggccaagtgctgggcggaaaatccggcttgtataaaacgcttacaaaatttgtgatcggcgccatggaactcgaggcgatgtcgaagtatacggatcctgggagcctgctcattgtcggaaaccgcacggatgcgcatgaattggcgttaaggtcaggggctgccgttttgattaccggcggatttgatacaaaagactatgtaaaaaaaattgcggatgagaaatcgctgccggtcatctcgacgagctatgacacgtttaccgttgcgacgatgattaaccgtgctgtctatgaccagctgattaaaaaagaaattattctcgtggaagatattttaacaccgatcgaaaaaacggcttatttgaatacaacggacatggtccgggactggtaccgcaaaaaacgggaaacaggccactcgcgctttcctgttgtcgaccgcaatttaaaggtggcgggcatcgttacctcgaaagacgtgatggaaaccgatacggactcaaatatcgagaaagtgatgacgaaaaatccgattacggtcagcgaaaaaacaagcgtcacatccgctgcccatatgatggtctgggaagggatcgaaatcttgccggtgaccgatgattttaaccggctgagggggattgtcagccgccaggacgtcttaaaggagctgcaaatgacacagcgccagccgcaagtcggggaaacgatcgacaatatcgtcacgacccagctcgatgcttcatcggccaaaacggaggatccggatgatttccagtttgaagtgacgccgcaaatgaccaaccccttagggacgatttcatacggtgtattcacgacacttgtgcacgaaacggccaaccgctttttgcgctccagaaaaaaaggcgatatgatcatcgaaagcttaacggtctattttatcaaaccggtccagctcgaaagcatgatccggattgtaccgaaaattctcgactccggccggaaatctgccaaaatcgatgtggaagtcttcaatcagggcaaccttgtcggcaaagccctgctgatgtgccagctgattgaaagataacggtacgtgccacgccttttacggtgcacgccgggattcgtccctttctttctgcatttcgggctggtaaaaccgcagccttttgaaaccgcctgcgatattgaaaagcccgagcgcgataaaaacggctgcgatgatataagtggcggcagtgtggaacagaaacaattcattcacgccgaacaaaaaaataaatgaaccgagcgccatattggctttggcggaaaacacctttttttccatcaccaaaaggctgcggacgttttttagtttaaaatatacatacgcgctaatagatgcgagaatcaaaacggcaaggatcggcatcgtgcacctccaaatcgagttgtccgtatttccttctattttacaaaatgaaaaaaatcttgccagagaaacggggagtaagatgaaagcaaaaattttacagacgatcaggctttttgacacgatcatcatccaccgccatgtccggccggatccggatgcttacggatcgcaggggggacttgcggaaatactgaaggcgtcttttctggataaaaacatttacatcgtgggcgacgatgaaccggccctcgcctatttgaacaggatggaccggattccggatgaaacgtaccgcggggcgcttgtcatcgtttgtgataccgccaaccgcgaacggatcagcgaccagcgcttccatctcggggaaaggctgatcaaaatcgaccaccacccgaaccatgatgcttatggggatattcaatgggttgatgaagacgcgtcctctgtcagcgaaatgatctatgagttttacttatccgggaaagaagaggggctcaggatgacagatgatgcggcaaggctgctgtttgccggcattgtcggggatacaggccgatttttgtatccgagcacgacggaaaaaacatttgactatgccggtgaactgatccattacaatttcgaccggacggcgctctttaacaagatgtacgaggttgaaccggaagtcgtgaggctccaagggtatatataccagaacctggacattcttgagcacggggcggcgattgtcgtgctgaaaaaagaactgattgaaaaattcggcgtaacggtgcgggaagcctcccagcttgtcaccacgctcggcgatattaaagggcttaaagcctggtgcttctttatcgaagaagaaggccaaatccgcctccgtttccgttcaaaaggccctgccatcaatgagctggcccgcaaatacggcggcggcgggcatccgcttgctgccggggccaccgtgcattcgtgggaaacgacagaggcggtaaaaaaggatttgatcgcgctctgcaaggaagggtaaaaaaagaaggcagaaccgcgggaaagcggatttgccttctttcagtctgccagctttaaattcaggtggacgcggacaacggagtaaaacaaaatgtctcgcacttcgaaggtatagcggcggtggttgattttaatgactttgttttcgagcatgcggataatcaagtctttgttcaaataagcggtttttaaattttttgcgatcagcgggcttaagtcatgtttaatatcctcttctgcttcaaaaatgctttgtgaatcgtggatatcatatttttcatagttgctgattttcacgtcaatacgctggatggtcaggagcttttcatttttttgattgagttttttatagtcttcctgccagattgccttttcctgttgcaaatcctggatcgttttttcctggcgttcaatcatttgcgcctgcctttcctgcatgacaccgaacatatacagaaaaataagccagctgatgcaaccgcccacgataaatccggccatgaaccgctgccagcccggtttccggtaaagcggcgggattctcatagcacattctcctgggtaatccatgaaataataagcgcggccgttttggcaccgcccatggccgacagaattaaaagcagctgcttgaacaataccattgtctcgctttccaaaaatcctttttcaaagctgtaaacggtatcgaacgtccccccgatggcggcaatgatcgcccagatgcggaggtcgcgcgcaatcttcgaaatttccgtcaaaagcggctcgccggtaatgaacgaagcgagccccccgatcaaggcgccgccgaacattacgccgaacgcgataaaataactgttgaaaaatgcgggaaaaaacccttcgctcaaccgaaccatccccatcttttcttcattactaaacaatatatgggacaatgcgtgcccgtatgaaatcgaacgtatcttcttttttgcccgcttgaaaacatgtataataagaatcatgtacaggtacgaataggaggcagtttaacatgcgttttgtccatttgcaggtccaaacagcctacagcctgctggaaagtacgatctccatccctgaatgggcggcgtacgcaaaagcgcttcattatgacacccttgcgatcacggaccgcaatgtgatgtacggggccttccctttttacaaggcttgccgcgaaaacggcatcaaacccgttatcggcatgacagcggatgtgatgagccaatttgaacccggcaaagcctatccggttgtgttgcttgccaaaaacgaaaccggctaccggcatttgatgaaaatctcaagtgccatccagacgaggcccgaacccggcattttcacaaaatggctgcgcgcctacagcgatggcctgatcgcctttacgccggggcttgaaggggaaatcgagcaggcgctgttgcgggacgatggaccgcgcgcagaagaggttgcggttttataccgggaaattttcgggccgagcttttatcttgcacttgaaaacaacgggacagcgcaagctaagaaagtgcttcccgatatgcatgcgctgtcggaaaaactgggcatcccggaagtcgttgccgcaaatgtgaagtacttaaagaaggaagatgcttttgcccatgaagtgttgcgcgcgatcaaagccggggtgaaacttacggatgaaaaccggccgggcccggaaagcgggatgtacgactttaagccgcagcaggaaatggaacagctttttgccgatttcccggaagctttggccaatacggaaaaaatcgcagatgcctgctctgtggaaatcaaaacgggacagcggctgctgccggcgtttccggttccgggcgggcagacggcggatgccttcctggaagaagtgtgccgcaaaggcctcagcgaacgcgtgccgaatccgggagaacggtatacaggccggctggagtatgagctgaaaatcatccgggaaatgcagttcagcgactatttcctcattgtctgggattttatgaaatatgccagggaacacgggattcttaccgggccggggcgcggttccgctgccggctcccttgtcgcatacgcgctttatattaccgatgtcgacccggtgcaatacgggcttttgtttgaacggtttttgaacccggagcgcgtctccatgccggatattgacagcgattttccggatcacaggcgggacgagatgatccgctatgtcgcggaaaaatacggccggcagcatgtcgcgcagatcatcacattcggcacatttgccgcgaaagccgcagcccgggatgttgcccggattttcggccttgaaacaaaagagcttgaacggttgtcgcgcttcatcccgtcacagcctggcatgacgcttaaaaaagcatatgaagcatcaagcgccttccgggagtggatcggccagtcggaccagcgccgcaagctttttgaaacggcccggcttttggaaggcttaccgcgccatgtttccacccatgctgccggcgtcattatcagcggtgaaccgcttacgggcatcatcccggtgcaggaagggcatgacggcatttttttaacccagtatccgatgaaccatctcgaagaaatcgggcttttgaaaatggacttcctcggtttgcggaatttaaccattcttgagcatatcctcgcggggatcgaaaaggggacggggagaaaaatccgcctccaggatgtgccgcttgatgatccggagacatttcgcctttttagtacgggcaatacgactgggatcttccagttcgagtcggacggcatgcggaaagtgctcgagcggcttaaaccgaccgaatttgaagacattgtcgcggtcaatgcgctgtaccggcccgggccgatggaaaatatcccggcctatattgagcggaaacacggggtgaaaccggtcgaatatccgcatcccgatcttcagccgattttggaaaaaacatacggcgtgattgtctaccaggaacaaattatgcagatcgcttcaaagatggcgggcttttcgctcggggaggcggatttgctccgccgggccgtcagcaaaaagaaaagggaaatcctggacgaacagcggctgcattttataaatggcgcgcaaaaaaaaggatatgagaaaaaaacggcgaatactatttatgattttatcgtccgtttcgccaattacggttttaaccgcagccatgccgtcgcctatagcatgctcgcttgccggcttgcttatttaaaaacccattacccgctctattttatggcgagccttttgacgagcgtgatcggcaacgaggataaaattgcccagtatattcgcgaagcgcagcagatggggatccgggtcttgccgccttccgtgcagcacagccattatccgtttaccgtggaaaacggcgccatccgctacagccttgctgcgataaaagggatcggatacgcctccatcaaagaactgcttaaagaaagaaaacggcgcccgtttaaaagcttgtttgatcttgtcctgcgggtgaaagggctgaaccggaaaattttagaggcgtttgcattttcaggcgcgatggatgaattcggaaaagacagggctgtcttgcttgccagcatcgatgtcgcccttgaacatgcggacattatgcagccggatgacgggcaggcggatctgttctttgaggatgaagcgttcagcattgaaccgaattatgtggaaaccgagccgatttcactgatggataagctcgcatttgaaaagcaatatttggggctctatctatccgggcatccggccgggcagtaccggcctttttgggacaagacaggcgtgcttgcggtaagcaagctgcattcgggcatgaggaaaatccggtttggtgcctgcattacggacacaagaacgatccgcacaaaacaaggcagcctgatggcatttttgcacatgagtgacgaaacggatgaaatagaatgtgtcgtctttccggatatctttaaaaaatacagcccgttatgccaaaaagggttgattgtggtcgtggaaggaaatgtcgaaaacaggaacggcaaaaagcaggtgattgcccgggggctgcaagatgccggcccgttcatgcctgccggcgccacgttatatttaaagattccggctggaaaggaccgcatgctgcttgttcaagtgaagcaggtgcttgacgcttttccgggggactcgccggtcattcttcattatgaagaggaacggaaaacgatccggcttccggaaaaaagccgggtccgggcggaggaagcgtgcctcgaaaagctcacggaactgcttggtgaagggaatgtcatattgaaataagtttttctctccagattaatatgttatattgtttaataggcttgtgaataagaaatcgcatatcgtgcagtgaaaacgggggagtgaggttcatgtcattgcgggaagaagcgttacatatgcaccgcgaacacaaagggaaattggaatccaagtcaaaagtcaccgtcaaaaatgcaaaggatctgagcctggcctattcgcccggcgtggctgagccttgcaaaatgatctacgacaaaccggaaacggtctatgaatatacgatgaaaggcaatatggtcgcagtcgtaacggacggcaccgccgttctcgggcttggaaatatcggccctgaagccgcactcccggtcatggaaggcaaagcaatattgttcaaaagctttgccggcgtcgatgcctttcccatttgccttgatacgacagatattgatgaaatcgtggagacagtgaaacggctggaaccggtttttggcggcgtgaatctggaggacatcgccgcgccaaactgttttgtcattgaagaaaagctgaagaaggaaatgaatattcctgtttttcacgatgaccagcacgggacggcgattgtaacggctgcagggctcgtgaacgctttaaaactcgttggcaaagaaatgtctgaaattaaagtggtggcaagcggcgcgggtgctgccggcatcgcgatcatcaaactgctttacaactttggcgtccgcgatattatcatgtgcgactccaaaggggcaatttatgaagggcgcccgttcggaatgaacaaggtgaaatccgaagtggccaaatatacaaaccgtgacaaagcagcaggcagcctggcggatgtgatcaaagaagcggatgtttttatcggcgtttccgtggaaggggcgctgacaaaagaaatggtgcagtcaatgaaaaaagatccgattatttttgcaatggccaatccgaatccggaaatcatgccggcagatgccaaagcggccggcgcgaaagtcattggcacaggccgctccgattttccaaaccaggtcaacaatgtcctcgccttcccgggcattttcaggggggcattggatgtgcgcgccacgcatattaatgaaaagatgaaacaagccgccgtccacgcgatcgccggtttaattgatgaacatgaactgaatgcggattatgtcattccacgcccgtttgatccgcgtgttgcgccggcggttgcggcagctgttgcgaaagcggcgatggaaaccggtgtcgcccgcattcaggtggacccggaagaaatccgcgaaaaaacgaagcagctttccgaaattggcaaataagcatcagttgccggaagaaaaaagccgccttttttgccggtacttcggcagaaaaaccgccggcttgcccggtggttccggtgccagatacaggaggggtaagatttgctgaaagattttttttctaaaccgaaaaagcgaaaatatgcgactatcccttcagaccatacaaggcaggaagttcctgaagggatcatgtcaaaatgcccgaagtgcggcaaaatcatgtatacaaaagaactgcagaaaaatttaaaagtctgcctccattgcggctaccattatcaaatgaccgcttatgaaagggtggaaagcctgctggatgaagggacgtttgaagagttcgaccgcggccttgtttccaaaaacccgcttgcgtttccgggttaccttgaaaaactggaaaaagaccgcaacaaaacaaacctgaatgaagcggtactgacaggtaaaggcgacattcaggaaaggccggtcgtgcttgctgtcatggatgcgcaattccggatgggtagcatgggctcggttgtcggcgaaaaaattacgcgcgccatcgaagaagcagacaggctccatgtgccgtttatcattttcactgcttcagggggcgcccgcatgcaggaagggatatattctttaatgcagatggcaaaaacgagcgcggcgcttgaaaggttcagccgccacggcgggttaacggtaaccgtgatgacccatccgacaacaggcggcgtgactgcaagctttgcttcgctcggggatatcaatcttgcggaacccggtgcgttgatcggttttgccggccgtcgtattattgaacagacgatccgagaagaacttcctgaagatttccagactgcagaatttattcttcaacacggccagctcgatgcggttgtgaaacgccatgacctgaaaaaaacattggcaggcattctggacatccatcaaccaacaaacgcaggtgaattacaatggtgaatgaacttgaatttgaaaaaccggtcattgagctgaaacgcaaaattgccgagttaaaggaatttacaaaacagtcggatgtcgatttgtcaagcgagattaaaaaactggaagcaaggctttcccggctggaagaggaaatttacgaaaacatggatccgtgggacagaatccagattgcgcgttttcccgaacggccgacatcattggactatattcaatatctttttaccgattttctcgagctccacggcgaccgtgtatatggcgacgacggggcggttgtcggcgggatcgcaaaatttgagggtcttcctgtcaccgtgattggccagcagcgggggaaagacacaaaagaaaacatccgccgcaatttcggcatgccacacccggaaggctaccggaaagcattacggctgatgaagcaggcagaaaaatttaaacgcccgattatcagcttcatcgacacaaaaggtgcgtatccgggaaaagcagcggaagaaaggggcatcgctgaatcgatcgcgcgcaatttgtttgaaatgtccgggctgtccgttccgatcatctgcctgattatcggcgaaggggccagcggcggggcgctcggcattggcgtcggcgaccatatccatgtcctcgaaaattcatggttctcagtgatttcaccggagtccgccgcggcgcttttatggaaagatgcatcgcaggcaaaacgggctgtcgccaccatgaagatgaccgcgcccgagctgaaagaactgggcattatcgatgatctgattccggaagtaaaaggcggcgcacataaagatccaaaagcgcaggcagagctgatccgccccgtgcttgccgcatcattaaaggagctgcgggcatatgcccctgaagaactggtggaaaaaaggtacgaaaaataccgtaaaatcggcgtgttttcaacgctcgaacagtttgcccgccagtagccgcaaggatgacaggcaaccggctgactttgtgccggttgcctcgctttttacacggtgcaatgtatacaagccaaaatttttggcgttctgtttttccagctagtccctttcttctaagtggttggaacgtaaaaacagatcctggtttaccggcatggaaaccgggaaaagaaaaaagaacgccctttgctggcaagcgggaaggctggggaattggtagcgtattcatactattccgacacagtttgttcaaaaacgcacatttttaaaatttttactttttcatgattgattgtgaacatgcttttaaagtggtattttagatatatccgaaggcagacttggcgatactatagttactttgcttgattgaaataccggcctgccatgagaattacatatacagaggtgaagcatatgaagcgaattggagtattgacaagcggcggcgatgcaccggggatgaatgcggcggtccgcgcgattgcccgtaaagggatttatcacggcctggaagtttacggcattcaccaaggttataacggattgattcaaggaaacatccaaaagctcgaagcaggatctgttggcgatattctccagcggggcggcacggttttgcagtcggcaagaagcgaagaattcaaaacgccggaagggcagcaaaaagcgatcaggcagctgaaagaccatggcattgaagcgctcgttgtgatcggcggcgacggttcctaccaaggggccaaaaagttgacggaacagggctttaactgcattggtgtgccagggacaatcgataacgacatcccggggacggattttacaatcggttttgatacggcattgaacacagtgcttgatgcgattgataaaattcgcgacaccgcttcttcccacgaacgcacctttattattgaagtcatgggcagaaatgccggggatatcgcgctctggtccggcctggccggcggagccgaatcgattattattccggaagaaaaatttgacttaaaagatatcgtggagcgtcttgaacaggggagaaaacgcggcaaacgccacagcatcatcattgtcgcggaaggcgtgatgagcggcaacgagtttgctgaacaattgaaaaaaaccggtgtgatcggcgatacccgcgtttctgttctcggccatatccagcgcggcggttctccgacggcatttgaccgcgtgcttgcaagccgtctcggcgcaagggctgttgaactgctgcttgaaggaaaagggggccgcgctgtcggcattcaaaataaccagctggttgaccacgatatccttgagattctcggaaaaccgcacgccgttaataaaaacatgtacaagctgtcgaaagaattgtcgatctaacgtttcttaggaggaaatagaatgaaaaaaaccaaaattgtatgtacaatcgggcctgccagtgaaagtgtggaaatgcttgaaagattaatggcaaacgggatggatgtttgccgcctgaacttctcgcacggcagccatgaggaacatcttgcccggattaaaaatatccgtgaagctgcaaaaaaccaaaacaaaacgatcgggcttctgctcgatacaaagggcccggaaatccgcacccatgatatgaaagacggcggattcgagctcgttgaaggcatgacaccggtcatttcaatgacagaagtgctcgggacaacggaaaaattttcggtcacgtatgaaggactgattgatgatgtgcacgttggctctaaaattctgcttgatgacggtttgattgaactggaagtgacggccatcgataaaaacgccggtgaaatccatacaaaagtgctgaaccgcggcgttttgaaaaacaaaaaaggtgtcaacgtcccgggtgtctccgtgaaccttccgggcattaccgaaaaagacgtgagcgatatcctgttcgggcttgaacaaggcattgacttcattgcggcttcatttgtacgccggccgtctgacgttttggaaattcgccagctccttgaagaacacgatgctttacatgtgaaaattttccctaaaattgaaaaccaggaaggcgtcgacaacatcgatgaaatcctagctgtatcggacggcttaatggttgcccgcggtgacctcggcgttgaaattccgaccgaagcggtaccgctcgtgcaaaaagagctgatcagaaaatgcaatacgctcggcaaaccggtgattaccgcaacgcaaatgcttgattcgatgcaacgcaacccgcgcccgacccgcgcggaagcaagcgacgtggccaacgccatttttgacggcacggatgcgatcatgctttccggcgaaacggcagccgggaaatatcctgctgaagcggttaagacgatgtacaatattgcggttcatgtggaaaaagcaattaaccaccgcgatattctgaacaagcgcagcaagagcacggaccataatatgacagacgctatctgccagtccgttgcccatacggctttaaatcttgatgtgaatgccattattgcgccgactgaaagcggctatacggcacgcatgatctccaaataccgcccggcggccccaatcattgctgtcacgagcgatccgaaggtacaacgcggcttaactgttgtgtccggcgtatacccacaattgggcacaaaggcaaacaatacggatgaaatgcttgaaattgcagtggaggaagcgttgaaatccgaaatcgtccatcacggcgaccttgtgatcattacagcaggcgtcccggttggtgggaaaggcaccaccaacctgatgaaagtgcacctgatcggtgatatattggcaaaaggccagggaatcggcagaaaatcggcattcggcccggtcatcgttgctgaaagccctgaagaagcaaacgcaaaggcaacagaaggttgtgtgctcgtcacgagaacgaccgacaaagaaatcatgccggccattgaaaaatgcgccgcgctgattacggaagaaggcggcttgacaagccatgctgcagttgttggcatcaatgtcggcattccggtcattgttggcgttgaaaaagccgtttccatttttgaagacgggcaggaagttacggtagatgcggcaaccggctcggtttacaacggccatgcgactgtattgtaagtaaactaaaaaaagcgcagaggcatccggcctctgcgctttttatattgcttttttgcccataatatagttccaaatgtcatggaacacatgggcacggatcaatgcggtcagcaacacgagcgtaatcggcccgagaatcaggccgagaaacccgactgttttaaatccgataaacagggcaatcagcgtcgcgagcggattcattccgatgctggacgataaaatttttggctccataatctgcctttgcacgatcacgacaatgtaaaggacggttagcccgatcgcaagcggcaggctgccggtaatgaattcgtaaatgatccacgggacaaacacaacgcccgttcccaaatacggaagaatatcgacaataccgcaaacaagggcgatcgtaatcgcgtaattcacacgcaaaatcaaaagcccgatcagcacaatgacaagtgtcatggaaatcaatgtcaattcagcgcggataaaaccgaacagcgcattgcgcaggtcggcaaacacggtgatcccgctttttcttgcttttttcggcagcaacagctttcctttgcctgtcaaatggttccagtctttgctgatgaaaaacgttgcaagcagggcaaaaatcagcacggttgccgcatttggaatccaggaaacaagccccggcagttttttaaacagcccggacaggaaatcgcctgctgaagaagcgatcttttgcccggctgcctggatgttttgcacgatcgtttcctgctggccggcatcgagatttttaaagaggcccgccagcttgtcgtacagcggcaaaacttgtgcggtgacaagcgattccgaataattgacaagcgtctggacatgctccggcaaaacgtcagcaaggtaattcgcccctgttacaatctcggcaacaagcagcgtaatgatgccgacaaagacactaatgatcaggatcagggatatgataacagcaagcgcccgcggaagtctcacctttttgtccagaaaattgacgagcgggttgatcataagcgcgatcaacagggcaataataaacggataagcgtattttacagccagatagactgcaaaaaagccaaccaggatgcacagtgcaacaaaaaggccccgcagcgcgcggtgtatgtaaacggaattcaagtctgaccctcctgttttcgttaatatgttattattttacacggcggggcgtgtaaaacaaagaaaaagctgtttttttttgatagattttctatttccatctttgccaaaaattcagaaaaaatacccggcgccataagattttcagcatgaaagaagggatatatatgtaccagccgtatttgtttttgctgctgcttttagcgataggatttgcggcaaaaaaccaatcgttaatcatttcagttattgtgctacttgtcttgaaagtggcagggctggatgcaaaaattttttcaaccgtccagtcgaaagggatcaactggggcgtcaccattattacgattgccgtccttgtgccgattgcaaccgggcagatcggctttaaagatttgtatgaatcactcaaatcgccgtatgcatggattgcacttgcatccggcatcattgtcgcgcttctggccaaaaacggcatcaccctgcttgcgagcgacccgcaaattacgacggcgctcgtgcttggcaccattctcgccgtttctttgtttaaaggggttgcggtcgggccgctgatcggcgccggcattgcctggatggccatgaaaattgtcgaatgggtgacaaacagtttttagccgggagaaatttgcaggtcatataaaaaccgttgaaaaaaagacttttcaacggtttttctcctgttggccacagaaaggcgcatgctaaaatcgtatgtgtaaaattttactcgaagggcagatgagtggaaaaaaatgggaagacgctctatcatttaaatgtacgcttgtgggcgaatacatttagaaagaggtcttcctatggatattatatcaatgaaaaacttgacacatacgctaaaatcaaaatgattgccagggcggctgcaaaagcgctatactaaaagaagaaatttggcttttttctgtaccaatatgtttgaaaattgtttataatgatttatgtaagcgggcacatgtacgtcaaaaaatagacaaatataattattatattataatagagtatgtgatcgcttgcatattgccggccggcaaccgttatttattctgcagaaaaatatataccccgaaatcaacttatctacgtttgagatgggggaaacaactttttaaggagaaggagagataagcatggcagcaacaagaggtctggaaggggtcgttgcaagtgaaacttcaatcagctcgatcatcgatgacacgcttacatatgtcggctacagcattgatgatttagcggaaaaagccagctttgaagaagtcgtctacctgctgtggcatttaaaactgccgacaaaatccgaactggaaacatttaagcaggaactggcggatcatatggatttgccgaatgaaattttggatagctttaaaacctacccgatcgggaaagcgcacccgatggccgcgctccgcaccgctgtttccgcacttgcgctgtacgatgatgaagcagatgcaatggaccgggaagcaaacttgcgcaaagccatccggctgcaggcaaaaataccggcaattgttgccgctttcgcaagagtcaggaaaggcctggaacctgtcgcgccgcgcagagatctcggttttgccgcaaacttcctgtacatgttaaaaggaaaggaaccggaaccgattgaagtggaggcctttaataaagcgcttgtgctgcatgcggaccatgaactgaacgcatctacttttactgcacgcgtttgcgttgcgacgctttccgacatctattccggcgttaccgctgcaatcggcgcattgaaaggcccgctccacgggggcgcaaatgagcaggtcatgaaaatgctcaccgaaatcggctcggccgataaagtggaaaattacctgcatgaaaaattcatgaaaaaagaaaaaatcatgggttttggccaccgcgtttacagaaaaggcgatccgcgcgcaaaacacctaaaaaaaatgtcggaaaaattgacagagctgaccggacagcgtaaatattatgatatgtcggtaaaaattgagcaaattgtcacgagcgaaaaaggcattcctgccaatgtggacttttattccgcatctgtctaccattgccttggcatcgaccatgatctgttcacgccgatttttgccgtcagccgcatttccggatggattgcccatattctggaacaatactccaacaaccggattatccgcccgcgcgcggaatatatcggcccgggcatgcgccagtacgttccgctcgaagaccggtaacgcaaacctaggcggggaatcccggctgaaatttttcgcgattttttaaaacgcccgcccgtgcctttcaatctttcggggacgggcaagcgtgcgctttttggagaaggaccggcctgtggccattcacggggccggcccattccgtgtacaccacaagtataaactgatattgggactggaggagattttgaaatggcacaaggagaaaagatcaccgtagaaaacggcgtattaaacacaccgaatcacccgattattccatttatcgaaggggacggcacaggccctgatatttgggcggctgcacagcgcgtattggatgcggctgttgaaaaggcctataaaggcgaaaagaaaattgtctggaaagaagtctatgcaggggaaaaagcattcaataaaacaggggaatggctgccgcaggaaacgcttgacacgatccgcgaatatttcattgccattaaagggccgttaaccactccggtcggcggcgggatccgttcgctgaatgttgcgctgcgccaggaactcgacttattcgtctgcctgcgccctgtccgttattttgatggcgtcccttccccggtcaaacgcccgcaggataccgatatggtcattttccgcgaaaacacggaagacatttatgccggcattgaatataaagaaggttcgccggaagtgaaaaaagtcatttcgtttttgcaaaatgaaatgggcgtaaaaaagatccgcttcccggaaacttccggcatcggcatcaaaccggtatcgaaggaaggcacggaacggctggtgcgcgccgcgattaactatgcgatcaaagaaggacgcaaatccgttacgctcgtacataaaggcaatatcatgaaatttacggaaggcgcgtttaaaaactggggttatgaactggcggaaagggaattcggcgataaagtctttacctggtccgaatacgaccgcattaaagaagaaaaaggcgcggatgctgccaaccaggcgcagaaggaagcagaagcaaacggcaagatcatcatcaaagatgcgattgccgatattttcctgcagcaaattttgacccgcccgcgcgaatttgatgtcgtggcaacgatgaacttaaacggcgactacatttcggatgcgctcgccgcacaagtcggcggcatcgggattgcccctggcgcgaacatcaactatgaaaccggccatgccattttcgaagcgacgcacggaacggcgccgaaatatgccggcttggataaagtgaacccttcatctgttattttgtcgggtgttttgatgctcgaacatctgggctggaatgaagcggcaaaattgattaccggttcgatggaaaaaacgatcgcttccaaagttgtcacatacgactttgcccgcctgatggatggcgcgagggaagtcaaatgctctgaattcggcgatgaactgatcaaaaacatggcggaataacggacaaatgatttacggcaggccggctctgcctttttgacagccggctgacacttaaacaaaggaggctcgtcatgctgaaaaggaaaaaaatatcggttattggcggcggttttacaggggcgacaacggcatttctgattgcccaaaaagaactgggggatgtggtgctcgttgacatcccgcaattggaaaatccggtaaaggggaaagccttggacatgtttgaagcatccccggtacaggggtttgatgccaggatcaccggcacgtcggattatgcaggcacaaaggattccgatatcgtcgtcatcaccgcgggcgttgcgcgcaaaccggggatgagccgggatgacctcgtccagacaaaccaaaggatcatggaaaacgtgacaaaggaaattgtaaaatactcgccaaatgccgtgctgattgtactgacgaatccggttgatgcgatgacttacaccgtttttcaaacatccggttttccgaaaaaccgtgtaatcggccagtcgggtgtcctcgacacggcaagattccgcgctttcgtcgcagaggaactggacgtctccgtcaaagacgttaccggttttgtgctcggcggccatggcgatgagatggtgccgctcgtccgctattcttacgcaggcggcattccgcttgaaacattgattccaaaagagcgccttgataaaattgtggaacggacaagaaaaggcggcggggaaatcgtgaacctgcttggcaacggcagtgcttattatgcgccggcatcggcattaacggaaatggtagaagccattgccaaagaccagcgccgcatcctgcccgccgttgcttatctcgaaggcgaatacggctataacggcatttatctcggcattccggtcattttgggcggcaacggccttgaaaaaatcatcgaactcgatttgacaccggaagaaaaagcagcgcttgacaaatccgccgcttccgtccggaaagtcatggatgcactcgtataaacagaaaaattctgctccaaatccgcacgaagggtttggggctttttttcgtgcctgctcctttaaaacctgccggaaaaagcgatgatcgcgcctttcccggcggcaacagagcggcaatatttcgtttcttttttttaaaagcgccgcgatttttcctttgcgccgaatcatggtaaaatggggaaaggaatatgaacggatattctccatttttccgggaggttttggttttgaaaaaattgattttaattgatggaaacagcattgcctacagagcgttttttgctttgccgcttttaaacaatgacaaaggcatacatacaaatgcggtgtacggctttacgatgatgcttaccaaaatattggaagaagaaaagccgacgcatattttggtggcgtttgatgccggcaaaacgaccttccgccacgaaacatacagcgaatacaaaggaacgcgtcaaaaaaccccgccggaactgtccgagcagttcccgctgatccgggaactgctcgatgcccacgggattgaacggtatgaactggaaaattacgaagcggatgacattatcggcaccctgtcgaaaaaagcggaagaagaagggtttactgttaaagtcatttccggcgacaaagatatgacgcaactagtctcgccgaaaacaacggtcatgattacacgtaaagggatcaccgatatggaagcctacacgccggcgcatgtcgaggaaaaatacgggttaaagccgcaccagatcatcgacatgaaagggctgatgggtgattcatccgataacattcccggcgtgccggggatcggggaaaaaacagccattaagctgttaaaacagttcccgacggtggaagagctgcttagccatatcggggaagtatctggaaaaaaactgcaggaaaaattggaggcgcacaaagaacaggcgctgatgagcaaagaactcgccaccatccaccgcgacattccgctttcgatttccattgaacaggcggcatacaggcacgccgacccggaaaaattgcggcatttgtaccaggaattgggctttaaatcgatgcttgaaaaaatgggcgggggcgcccggacggaagaaaaaccggcactggaagctatttctttttcaatcgccgaagacattacggacaacttgtttgcggatgtctcttctttttatgtggagatcctcgatgaaaattaccatacgggcgagatcatcgggttcggtttaaaaaacgaaaaagggctctttttcctccgggcggaagacgcacttgcttccgaagcgttcaaaaaatgggtggaagatgaaagcaaaatcaagcacgtctatgatgcaaaacgttcgattgtcgctttgaggcggtacggcatggaactgcgcgggaccggctttgacctgctgctcgtttcttatcttttgaatccttccgatacggtcgaagattttgcttcggtggcaaaaacgcatgattatgggaatgtggaaaccgatgaggccgtctacggaaaaggcgcgaaacggaagctgcccggggaaaaacggtatgccgagcatatttcccggaaagcggaagcgattgatgccctttgcgaaccttgcacaaaagcgctcaaagacaacggccagcttgaactgtttgaacaactcgagctcccgctgtcccttattctggcggatatggaatacatcggcgtgaaagtcgatacggaccgtttaaaagaaatgggtgaagaatttaaactccggctccatgagattgagcagcggatttacagtatggccggcactgaattcaatatcaattcgccgaagcagcttggcaccattctttttgaaaaaatggggctgccggtcattaaaaaaacaaaaacgggatactccacgtctgccgatgtgctggaaaaattggaacctgcccacgaaatcgtcagggaaatccttcattaccggcagcttgggaaattgcagtccacctatattgaggggcttttaaaagtggtccaccgggatggcaaagtccatacgcgttttaaccaggctttgacgcaaaccggccgcctcagctcgacggatccgaatttgcaaaatatcccgatccgaatggaagaaggccggaaaatccgccaggcgtttgtcccgtcggaagaaggctggctcattttttcgtcggattactcgcaggtagagttgcgggtgctcgcccatatttccggcgatgaaaagctgattgaagcgttccgcgaaggcatggatatccacacaaaaacggcgatggaagttttccatgtaaaagcggaagaagtaacgcctgagatgcggcgccaggcaaaagcggtcaacttcgggatcgtatacggcatcagcgactacgggctttcgcaaaatctcggcattacccgcaaggaagccggcgaatttatcaagcggtattttgcatcctacccgcgcgtcaaggaatatatggatgaaactgtcagggaagccaagcaaaaaggctatgtctccacccttttaaagcggcggcgttacttgccggaaatttcaagccggaatttcaacttgcgcagttttgctgaaaggacggccatgaataccccgatccagggaagcgcagccgatataattaaaaaagcgatgatcgatatggcaaaaaggctgaaaaaagaaaagctgcgggcgcggctattgctgcaggtccatgacgagctgattttcgaagcgccggaagaagaaattgaagtgctgaaagaaattgtgccggaagtgatggagcatgccgtagatctcgctgctcccctgaaagtggattccgcatacgggccgacctggtttgatgcaaaatagctgcaggcaacaaagaaagaaaagaggaaaaagcaatgccggaattaccggaagtggaaacgatacgaagaacgctggcacagctcgttgccggcgaaacgattgaaagcgtaacggtgcttttaccgaaaatggtcaaaaagccgcttagcacagaggcgtttgccgatgccctggccggtgaaacgatccgttcgctcgggcggcgcggcaaatttctcattttttacacggaccattatgcacttgtctcccatttgcgcatggaagggcggtaccgggtttatggccaaaatgagccggttgaaaagcatacgcatatgatttttcattttcaatccgggaaggaactaaggtacaaagatgtccgcaaattcgggacgatgcatctgtttttaaagggagaggaactgtcctcgctcccgctttcgaaactcggccctgagccgttatccgatgcgtttacggaaaaatatttatacggcaaattaaagaaaacggaacgcaatgtcaaatcctgtttgctcgatcagacggtcatttccgggctagggaatatttatgtggacgaagccttgttccgcgcccgcatctttccggagcggaaagcaaagtcgctgacaaaaaaagacgtgcatcttttacacagcgagatcatccaaacgctgcaggaagccgttgaaaaaggcggcagcacggtccgttcctatgtaaattcacaagggcagatgggcatgttccagctcgaactgtatgtttacggccggaaaggggagccgtgccggaaatgcggcaccccgattgaaaagatggttacagcaggccgcggcacccattactgcccgaactgccaaaagaaacgcagataacgggatgaacattggtcaggccccctccatacactgatagcagcgatgcaaaacggaaggggcgatggccgtggatttccggctttcgattttgctattggcattggcggtcagcatggataatttcagcaccggttttacatacgggctgcggaagatgaagattccgcttaagtcccttctcatcatcgccgtttgttcgggggcctctttatttctttccgtgctgttcgggaagagcctgctccactggattcgcccagaaacggcaaaccggattggcggcgtgattttaattttgatcgggggatgggtgatgatccagtttttccggtcaaacgacgaaaaagaagaagaacccggggaaaaagtcgtgctcaactttgaaatccgctttttgggcgtcgtcatccatattttgaaaaaaccgatgagcgcggattttgaccgttccggggccattaccggaatcgaagcggtcatgctcgggattgcgctctcgctcgatgcatttggcgccgggatcggtgcgggcatcatgggctattccccgtttctgctcagtttccttgttgccggcatgagctttttgcttgtctcttccggcatccggctcggcatgctgttttcccggctgcaatggatccggaaaatttcctttataccaggtgttctcctcattttgatcggtatatgcaagttttaacaaggcaggtgggaatatggcaaagattatcggcttaacaggcgggattgcaagcggcaaaagcacggtgtccaagatgctgaaagcaaaagggtttacgattgtcgatgcggatattgccgcaagaaaagttgtcgaacccggcgaaccggcatatgaacaaatcattgaagcgttcggcgaagggattttgctggaagatctcacgattgaccgtaaaaaactcggggcactcatttttgcggatgaagcactccggatgaaactgaacagtattgtccaccctgcagtccgcgcctggatgacgcgggaaaaggaccgggcaattgaaaatggggaaaaaaccgtctttctggatatcccgctcctgtttgaaagccggcttacctatatggttgaacgcaccatcctcgtttacgtggatgaagaaacgcaattaaagagattaatggcccgcaacggcctttcagaaaaagaagcgcagatgcggatccgggcgcagatgccgctgagcgaaaaaaaggcattggcggatgcggtgatcgacaacaatggcagcccggaggaaacaaagcagcagcttgaaaaaatcgtgtcagattggcagctcgttccatgatggggtacatcatggttttttttatacaaaaatagggaaataacgctacataacttttaaaatatgatatactaattgatgaataatggattaaaagtatgtcatttattattcgaaggagttgtctgcactgtggaaacaaaaattgcgattaatggcctcggccgcatcggcaggatggttttcagaaaagccatgatggatgacactttaaatattgtggcggtgaatgcctgctatccggcggaaacactggcacatttgattaaatatgacaccatccacggcgtatttccgggggaagtggaagcggaagagggagaggaagcactcattgtaaacggcaaacgcatccggcttttggcggagcgtgatccggcccggctgccatgggggaaaatggatatcgatgtggtgattgaagcaacgggaaaatttaatgcgagggaaaaagccgcgctccatctccaggcaggcgcgaaaaaagtgctgctgacagcacccggaaagaatgaggatgccaccattgttttaggggtaaatgaaaacgttttagatatcgaacggcatcatattatctcgaacgcttcctgcaccacaaactgcctggcgccggtcgcgaaagtgcttgatgaacaattcgggattgtaaacggcctgatgacaacggtccattcttatacgaatgaccagaacaataccgacaatccgcataaagatttaaggcgtgcccgggcctgtgccgaatcgatcattccgacgacaaccggggcggcaaaagcgttaggccttgtcctcccgcagctgaaagggaaactgcacggcatggcgctgcgcgttccgaccccggatgtatcactggtggaccttgtcgtcgatttgaaaaaagaagtgacggcagacgaagtgaacgatgcatttaaggcggcggcgaaaggttcgctgaaaggcattttggactatacagaagtgccgctcgtttcttccgattatacgacaaatccgtattcggccattgtcgacggcttgtccacgatggtcatggaagggcgcaaagtcaaggtactggcctggtacgataatgaatggggctattcttgccgtgtcgtacaactggcgcagctcgtcgcagaaaaaatggaagagaccggaaaaatcaatattgcctgacacgaacggagcagaaccagcctgctccgtttcctttatcgggtaattgttgaaaacggctggaacagggagcctaaacgctgttggccaatagatgaatgatttaatcgctttccgggcgctgcttgttccgcctgttgatgaagaacacctcgggattgatatcggattatccggcagtgaattggcaaaagtcatctatcaggaaatttccgttgtgctgccggcgtatcgcggcaatcgtctgcaaaaaatactcgccggcgtgattatggaagaactcggaaaggaagggcattccttccgctatatttgctgtacggtcgcgccctttaacatgcccagcttgaaagataaatttgcacagggcatgcaaattgcggccctgaccgaaaaatacggcggccttacgcgctatgtattcgtgaaagacctgtacgaaccggttccgcctgcctgccgggaagtcaccccgatcccgatgaatgacttcagcgcgcaaaaagaaaaacttgccgccggctttcggggaattaaaatggaagaaaaggaaaacaggctgtggatccactacggccggaagtaaaaaatggcggttcataaaacgtcagggatcctttatggcggcggaaggaagcccgaggccggcattcggtgccgcaacaggtacagaagctttccaaaaacgtgcggggtgatttttcatcccgtttttctaatggcaatctgttgtctattcgccttcttttatatatgatggtaataagaatgtatctgaacggggggttcatatgaaatgtccgtcttgccatagcaacaatacgcgtgtgatcgattcaaggccggtcgacgaaggccgttccatccgcagaaggcgtgaatgcgaagactgctcttaccgcttcaccacgtttgaaaaagtggaagaaaccccgctcattgtcgtgaaaaaagacggcaaccgcgaagaatttaaccgtgagaaaattttgcgcgggctgattaaagcgtgtgaaaaacggcctgtgtcgctggaccagcttgaaaaaatctccatggagatcgaaaaagaaatccgcaggcaaggatatacagaagtcagttccaccctgatcggggaaatggtcatggacaggctgtcaaaagtggatgaagtggcctatgtccgctttgcttccgtttaccgccagtttaaagatttgaatgtttttctcgatgaactgaaagaactgctcaacaagaatgcttaaacggagtgccttttatgaaacagatatggaatgaaatacagccggttgaccgttaccgcgcatcgtcgaacggcctgctccaggattatgatcaaaaggtcatttcgctcctgtaccagccgttaatcgggccgcaatgttacagcctgtatatgacactgtggaatgaagtggaagtcggccggctctggtctgaagactggaaccattaccatctgatgagctttttgtccatgaatctgtccgaaatttacgaagcccggctgaaacttgaaggcatcgggcttttgaaaacatatatgaaacaaacggacgacatccgcatgtttatatacgaactgcagccgcccctgtccccggaacagttttttaacgatggtttgttaaatgttttcctgtaccggcagctcggcaggacacatttcctgcggttgaaaaacttcttttccgaccgtgccgtagaaccgggcgagtaccgggacatcacccgctcattccaggatgtgtatgccgcaaaaatcggccccgaagtgctgaatgacgcagaagcgcagcaactcagccggctggaggaaaaccgccgctatatcgaaaaaaacgccgccccggtcattaaaatcgaaaacacccatttcaattttgaccttttatatgcaaacttgcgtgacgacctgattccgctgcgcgccatcacgccggaagtaagggaagcgattgtcaagctttcatttttatacggtttaaatgaactagacatgaagaaaattttactccaggcattgacggcggacttggaaatccgggtggaggatttgcggaaaatcgcgcgcagctggttccagattgagcatcatgatgaactgccgcgccttgttgaccgcttccagccagaaacggatgcgaaagaacaaaaagagccggaaaacgatgaggagaaattcctccgctacctggaaacgacttccccgagacaaatgctgatcgatttttcaggcggcagcgaaccggcgaaagcagatcttttcgccattgaagaagtcatgtttgcccagcagcttcccctcggggttgtaaatgtattgatccaatatgttttatttaaaaccgatatgaaactgtcgaaaaattatttggaaaaagtggcctcccactgggcgcgcaaaaaactgaaaaccgctaaggaagcgatggcgtttgccaaaaaagaagaccgccagtacaaacaatggctgaacaataaagagaaaaacggcaccgggcggagaaagccggtccgtgttgagaagctgccggactggtttaaaaaagaagaccaaaaaaccgctgcggccgcagtccaagctgatggggagtcattggaagaaaaaaggaaaaggcttgaaaaaatacgtgaacaatacaagaaagggtgaaggcagtggaaaacataaacgagacgctcaaaaggctttcatccaatcccggtttccgcaagcgttatgaagaaatgaagcaggaaatcatcacgcatcccgacgtccgcgcttttttggatgcacaccgcggcgaagtcacaagatcgatgattgaaaaaagctggatgaaactatacgaattcatttcacaggaaaaaaattgcagccggtgcaaaagccttggcgaatgcgtgaatatgatgaaagggtatgtgccggaacttgttattgaacatggcaatattgagatccactataaaaggtgccagaagaaaatattggaggatgagcgcaataaaacgcgcaggctgatccaaagcatgcacatgccgaaaaaaatactggcggcatcctttggtgattttttccttgaacaaacggggcgcctggatgcatacgattttgcgcatcgctttgtccgtgaatacgagccgggcaaaaaaatgaaggggttatatttattcggcaatttcggcgtcgggaaatcgtatttgcttggtgcgattgcgaacgagctggcggaccggaaacaggtctcttctttaattgtgtatgtgcccgagtttttccgcgaaatgaaggattccatcggcgaccactccaccggggaaaagctggatatggtgaaacaagtgcccgtattgatgctggatgatatcggcgcggaaacgaactcgagctggacgcgggatgaagtgctcggcccgattctccaatacaggatgcaggaagaccttcccactttttttacatccaatttcagctatgaggatttagaataccatttcacttatacccagcgcggggaaaaggaagaattgaaagccgcgcgcatccttgagcgcattaaatatttaagcgtccctgtccggatggaggggccgaaccagcgggcctgacccttatatgaagggggcccgcctttttcatttcgtaacgctttgccgccttctatttgccggtgccccttcatatacataaggtaaagcaaacgagcatgttttaccgtacagggggggcttggattggaattcctgatcagggacaaggatgatgcattatggataaaagcatattttgcaaaggaaaaagggcgcgctgtgaaaatccgggaagcagtgctgcatgggaaaatacattatgtggtggaagcggccggcagtaaaaaggaactgcaggcggccgttgcagattttatcatgaagaaaaaaagaaacgagtggatttgcaatcaattgcaacaagcctatttttttcgggcgaaagaagagcaaaaccggatactcgaaatcgtggccggcatgctgaaaggagagcggccggagctgacggatatggcgggcgggattgaagaacgtgccgccatcgaaggggcggtcgcaccgctggttggcgaatcgcgcacattgccgctcgcttccgtgctgacgttccgcttaaaaggctattttgactgccttgaccgatacatcggtattgcgattgacgaatacaaaatggaacaggaataccagatttttgtgcaaagcttgagggattacttgaagcaaaaagaaccaaaaagagaaaaaataaagctctgcctcggggaacaggtgaaattttacaacggccaattccgggaaatgacgagggaagaactggatgggctgattgaccgcaggcttctgtccaaccaccctgtctatattgactctgtcacgattgcaccgcttttatcgattgcgcctgcccgcattgaaatttatacggataccccggaccatgctttgatccgtacgatatgcaatatttttgaagaacgggtggccgtgaaaagccggatgcactttatgcacgatcagctcgccgccagcgaatgataaaaagggggccttgaagcggggcaatgcagcacggcaacaaaatccatcgctatcccttgattttttcattgcaaacttctataattacttacataatcaattggaaatgaaaaattcaatgtgatgacgaggacaacaggattctgttaccgcctttcagagaggaaagccccaggctgcaagctttccggcacgggcaggatgcttaccgcctccgaacttcagccgtgaacaaaataagtagcggctggcggatatttccgttatcaaactcaagccgtacgtggagacgtgcggaaatgagggtggaaccgcgtgtacaaaactcgtcccttgccggggacgggttttatttttttgctttgttcttgcggccacccgcgttgacatcatttttaaaggagtgggacatatggcagagatcgtaaaaatcacatttccagatggcgctttaaaggaatttccatttgggacaacaacggaagagattgcccaatcgatcagcccgggcctccgaaaaaaggcgctcgccggcaaactgaacggcaaactgctcgatttgcgcacaccgattgaagaagacggcgcaattgaaatcgtcacccctgagcatgaagatgcgcttggcattctgcgccacagcacggcacatttaatggcacaggctgtccgccgcctgtatggcaatgtcaagtttggcgtcggccctgcaattgaaaacggattttattacgatatggatcttgacgcgtcgatcacgccggaagacttgccgaaaattgaaaaggaaatgaaaaaaattgctgcggaaaaccttgaaattgtccgcaaagtcgtatcccgtgacgaagccagaaacatatttgcgaatgatgaatacaagcttgaactgattgatgcgattccggacgaaacggtcacggtttatgaacagggcgaatttgttgacctgtgccgcggcgtccatgtgccgtcaaccggaaaaatcaaggaattcaaattattaagcattgccggtgcatactggcgcggcgacagcaacaacaaaatgatgcagcgcatatacgggacggctttcttcaagaaagaggatctcgaggcccatttgaaattcctggaagaagcaaaagaacgcgaccacaggaaaattgggaaagaactcgaacttttcacgaactcgcaaaaagtcggacaaggcctgccgctctggctgccaaaaggcgcaacgatccgccgcatcattgaacggtatattgtcgacaaggaagtcaaactcggctatgaccacgtctatacgccggtgcttggtagcgtggacctgtataaaacgagcggccactgggaccattaccaggaagatatgttcccggtcatgaaaatggacaatgaagaactcgtgttgcgcccgatgaactgcccacaccatatgatggtgtataaaaatacgatccacagctaccgcgaattgccgatccggattgccgaactcgggctcatgcaccgttatgaaatgtcaggtgcactctccggcctgcaacgggtgcgcggcatgacactgaatgatgcccatattttcgtgcgcccggaccagattaaggaagaattcaagcgcgtggttgaactgattcttgaggtctataaagatttcaacattaccgactactcgttccgcttgtcgtaccgtgacccggaaaatacggacaagtattatgatgatgatgaaatgtggaacaaggcacaggcgatgctgaaagaaacgatggatgattttggttttgactattacgaagcggaaggcgaagccgcattttacggcccgaagctcgacgtccaggtccgcacggcgcttggcaaagacgaaacattgtcaaccgtgcagcttgacttcttgctcccggaacggtttgacctgacgtatgtcggggaagacggcaagccgcaccgcccggttgtcatccaccgcggcgttgtttcgacaatggaacggtttgtcgcttatttgatcgaggaatacaaaggggcgttcccgacatggctggcaccggtccaggtacaagtgattccggtatcgccggatgcccattatgactatgcgcggaaagtccaagaaacgcttaagtctgaaggagtccgcgttgaactggacgaccgcgatgaaaaactgggttaccggatccgtgaagcccaagtgcaaaaaatcccgtacgcgctcgttgtcggcgaccaggaagctgccgacaacacggtcaatgtccgcaagtacggcgagaaacaaacggaaacggtgccggtcgacaccttcctcagcaagataaaagaagaaataaaacggtaaaacagacaagaaatcacgcaccctaaaggaccacaaaaaggtttgcagggtgctttttattatataatagaggaaaaaatgggttggcacaggggaaggggacggagcccaatgcacttatttcggaatcgtcattttaatgcgttgttttttggcaggctgttcaccaatattggggatagtgtttattatattgccatgatgtggatggttttaaaattaggggggaactcgacggtctataccggatttgccggattcttattttcgctgacagaggtgctgagcttattttacggcccggttcttgacaaaataaatgcaaaaaaattgctggttacagcaagcgttttacaagccggcttactgctttttcttgttgttttaagcaagtatggaatcatgaatgtctggctgctgttgctttccatcccggttctttcgtttttatcggaactgacttacccgttagagagcgtattattgccgaaagccgtggaaaagaaagatctcgtcaaggccaattcactcatgtccattgcatataagggttcggattttttctttaatgggattgccgggtttatccttgccgctttctcgatgtcgatggtgctcggtatgaattcgcttctttttatactctcatccattctgtttttgtttttaaaagtacaggtaaaaagaagcaagcaaaccgggagcgtacgggaagaatggcaggcgtacaaacgggattttaaagaaggaatatcgtttgtcaaacagcctttcatcttgcaattattaatccccttgctgtttttaaacttttttttcgcaattgtaatggtcgtattgccttctttcgccaatactacgggcgaaggcgcttcatcctacggcatcatgacagcggctttgggcttaggggctttggcaggagcagcaggtgcggataaaatcagccggatatttccatttggcaaaatattggctgcaggctttttgctctccgggttgtcctggctttttatgattttattgagcaatgtttcgatatggtatgtttatacgcttatgtttatttccgagttatctattggcgccatcaatgttttgttttctgccatatttcagcaattgcctgatgaacaaatgttagggcgggtcaataccatcaatgtgagtttgctatcgcttgcgatgccggcaggatcattgatcggcggcgtgatggccaagatcacttccgtccagcttaccatgagcttttttggaatagggctgtttgtcctggcactgttttatatgggaagcggaagaatgagaaaactgccaaaagttgtggagattgaccatacgtatgtgaaattaagtagataaaaaaggagataaatggaacgcacggctattatcggaaaattggattgaaaccggtggcatggttaggaggggaaaatgaaaaattgatttacatttgatccgatttccgttcattttatataaaatgtcgctctcttgcctaccgaaaaaagcatgtaaatagatgctcaggcttgatgtaaaaactttatttttagaagcttttgtttcaacaaagacaagcattttcattaagcacttcaggagaccaaaaaaacacttgcgatttctctgccgttttgataaaataacgcatgttgagccaaaaaagttaaacagatttttcgggattcttgcaaattgacatggatacggtaaagtgatacaataattgagtggaattgaatataagtttgtgaaaagaaggagcagcccgcttctcacctgttgacgcaattgtgcagttgccaggtatctattgatgattgtgactataagcgcgggtgtgttccctgcgcttttttcgtgtacagtacgttcagggctttttcgcaagcgatatattcacacgtttgtttgaaattatcttggaggtggctcattattagcaaagacatgatggtgaacgaaggcattcgtgcccgcgaagtccgtttaatcggccaaaacggtgaacagatgggggttaaatcccggaacgaagctttggagattgcggcacgtgccaaccttgaccttgtacttgttgcgccaaacgcaaaaccgcctgttgcccgcatcatggattacggaaaataccgtttcgagatgcagaaaaaagacagggaagcacgaaaaaaacaaaaaattattaacgtaaaagaggttcgtttgagcccgaccatcgaagaacatgactttaatacaaaactccgcaatgccattaagtttttggaaaaaggcgataaggtaaaagcctcgatccgctttaaaggccgcgccattacccataaagaaatcgggcagcgtgtcctcgaccggtttgcagaagcatgtgccgaagtcgccacggtcgaatccaaaccgaaaatggacggacggagcatgttcttagtacttacaccaaaaacagagaagaagtaacgccaacttaaggaggactaatcatgccaaaaatgaaaactcaccgcggctctgccaagcgttttaagaaaaccggctccggcagcctgaaacgttcccacgcttatagaagccatttgttcgcaaataaagtgacaaaacaaaaacgccagctgcgtaaatcaacgcttgtatccgaaagcgacatgaaacgcatccgccaaatgctcgacaatctgtaagaaaacaaagctttcaattaggaggaaaagattatgccacgtgtaaaaggcggtacagttacccgcagacgacgcaaaaaagttctgaaattagccaaaggttattatggttcaaaacatacattatttaaagttgccaatcagcaagtaatgaaatcctacatgtatgcgtatcgcgaccgtcgccagaaaaaacgcgatttccgcaaactgtggattacccgtattaacgctgcggcaagaatcaacggcctttcctacagccgtttgatgcacggtttgaaacaggccggcattgaagtgaaccgcaaaatgcttgccgacctcgctgtgaacgatgcacaagcatttgccgaactggcaaacaaagcaaaagcagcattataatcaaaaaacagagcttccggcatgccgggggctctgttttttaaaaaaagcattataaattttccgtctgctgtctgatttcttcctggttcaaagtttcgtttgcagcttccaaattggcatgttcgtccactgactcgcccggctgaaattctttttggtcggatgcgattgtcatttcaggctctgccggaatttttggcatctttttcgtcattttaaccaagaatagtcccccttctggtaaaaaatttccggattccccggaaaaaagtaaaaacctgttttagtttgatataatcatgaaagaactatacgaggagcgatttcaatggatgatgtcttaaaagtaaaattattgcatcctgatgcacaactgccgcaaagggccaatcccggagatgcagggctagatttattttccatcgaagaaaaaaccattgcgccgggggaagcggaactgatccgtaccggcattgcaatcgagctgccgcgcagaacagaggcgcaggtcaggccgagaagcgggctcgctttaaaccacagggtcacagttttaaacagcccgggtacgattgatgaagggtacagaggagaaattaaagtcattttaatcaactttggaaagcaaccgttcacagttgaaaaagggatgcgaatcgcccaaatgattatcgcgcctgtaatgtctgtcaccgtcaccgttacggaacagttagcagaatccgaaagaggggaaggcggatttgggtccacaggattggccgcgttagaggggatggaccacagcaatttctaaacggcacggcagctaaaatccggaaatggcggggcttgtgaaacaggcggatccatatatacttctgaaaatttccgttataataaatcgcatgaatgtgatgctggaggggaaaacgatggcaaaattagaccaaacacacctgcgcggtgcgaaaacagcagcccataaagtaaaccctgacatcgcatttgccttagatgtcggcattgcaggcgatacgccaggaatgaccgaaaaagaatcactcagcaaaatgggcgcagggccgcaaatcatgtttgagttcaaaaacaatgaaacacctgacaatcattttgagtactggaaaacgggcattttccattatgccgtccaggacccagatgtagaagggctcgtggaaaaaataaaggcgcacgggggcaaacaacggatgccggtccgcgaatattacccggggaaaaagccttaccggatggtctactgtgaagatccgttcggaaacttagtggaaatttacagccacagttatgaattgacatataacccgatggtcaatcaagtgctcccacgtgaggaactgccggccggtttgaaaaccttaaaaggccgccacgtacgcgggaaaatcattgtcagaatgcatgaagcatgattctaaaagcgccgcttccggacttgcatacgttaaggtcctgagtttggccggatttggtttattcccactcatcaaaacaggcagtgtggccacttgcatgtgatcatactgtctgtttatcattagctgactttaaattgattcaattcggtatccagcttgccggccagctcctgcgttgtgaactaatctctgtgaaggcccgctgttcctggccggaaaagacatttctcccgattttcaactgcttttaaacgatcaaggaatggcacaggggcgaaaaacagcgggccccctttggcgaaagggcatcccgctgtttttcagcttccgatatggaacatcagcctttgtactttttaatcaaatcaacaaatgcatctgtaaaagattgcaggaactggactgtgccttcatttacaatcttgccgctttcatcaaacagtgcagccacattgctgatataagcttcaggctgctggaggatcggcatgttcaaacaaacaagcgactggcgcagatgatgattggcgccaaacccgctcaagtttccaggggattggctgatgattgccgccggttttccattccatacactttggccgtacgggcgggaaccaacatcgagggcattttttaagacagccgggacggaacggttatattccggtgtgacaaacagcaccgcatcgagccatcttactgtattccggaatgccgtatactcggccggaacctggttatggtcatcaaaatcctgattgtataaagggagatttccaatctcgataaattctgtttcatatccttcaggaaaaaggttagctacattttccgcaagttttcttgaaaaagatgctttccgcaaagaaccaagcaaaattccaacttttgtcattttatcgacctgcttccatttatattttatgttagataatgataagtaaaccgcaccagaaagtcaaaatttccgcttgctatgttgctgtgccctaagccggctggtggtttcctgagttctggtgacagcaaaagcaatcgaaggccaatctgacatttcccgattacagtattgaccattcttcttcatgataatcaaaacgaaaatctttctttatacagcgcgtatctgcataaaagattacctattggctttgctggattggaatacatgagaacaacaagcattaacgaagaaaaaggtggattctggactggagagggaaacatcaatcgaagatattacgttttgttctgccatcagaccgttttcctggccttcactgcaaacaacaggcaagcgtatcccataccaaaaaggaagctttccggaaagctcccttttttggtattctgcttcaatgcactggggcgtaagtgctttcgatttcccggatgcgccggttcagttcctcgttaaccggaacttgaacgccatattttttgccgagtttgatgacggttccggaaaacaggccgacttcgctgtaccgttttgcctccacatcctgcgccattgacggcttgccggcagggctcaggtttccgaccactttcagccagtaacggagatcttcttccgtaagcggaaacccttctttttcggacaatgccattacttcccgcatggcggcaatcatcatctcgcgcgcagggccgtctttttggatttcgccgtaattgcttttgtaaacggcgacggtctggttgacgccgacattgagcatgaacttgccccaaagccttttcatcatttgggtatcggctttgtatggcaaatccgtttgctcaaagaaacgggccacttttttcattttgtccgaaaatatgcccggctctttttccccgaagcaaagcatgcccatatgcgcatatgtcagccggtttccggttttgacggcatccatcccctgggcgacacagtataacattttgtccattccatatgtacggccaatgatttcttcacttgagatcccattcagggcagacaaaatcactgtatccggcccgacatgctgtttaactgcttcaactgcctcatccagtccgttgaatttgaccgtaaatagcaccaaatccgaaggctccactgtttcttctggtgtggcatagtgaaagcggcatttttcgccgttgcagtaaacgccttcccgctcataccgctcaatgcgcttttggtcggcgatgatccgcaagttttccgccggcatttttttcgataaatgatgcccgaataaaatcccgagcgcgccgagcccaatgatcgatacggttttgatttcagccattcccccgcctccttttttcgttattttaccacaattccaaagaaactgtcattcaggctgcccgttccggatggccaggtattgttccagccctctttttcgcaatttgcacgccggacattccccgcagccgtcagcgatgataccattatagcaggtcagcgtcttttcacggacaaaatcaaatgccccgagttcatccgcgagcgcccatgtttctgctttgttgcgccacatcagcggcgtatgaatgacaaactgctggtccattgaaaggttcaaagtgacgtttaaagatttgacgaagatatcgcggcagtccgggtaaccgctgaagtccgtttcgcacacaccggttacgatatgccttgcgccgatctggctggcaagcaccccggcaaaagagagaaacagcaaattccgcccgggcacaaacgtattcggaagctccccgtcagcccctgctttcacggtcatgtcttccctcgtcagcgcgttcggggcgagctggttcaacagttgcatatcaagaatatgctgttttaccccgagctcttccgctatattttttgcacatgctatttcaagacgatggcgctgcccgtaatcgaacgtaacggcttccacttcctgaaacttttgctttgcccagaaaaggcaggtggtgctgtcctggccgccgctgaaaacaacgactgctttttcttttttcattgataatcgtcctttcacgcaaaacagcaccgaaaaaggatgctgttttcttagttttttagagagggtttcctaaaaacctctgccataaatgaggggttcttcccaattgattataccatggaacaggcgccatcttttaaaacatccgtgctaatcccaaaacacgtcttttcacataaatgccataaacagccggctttgctatgatccagatcacagttttcgcccggaccattttttaagatcatcatagtgattatctttatttgggagggacggctatgaaacgatatgtgcaattatttttcatgtttgcggtgacggtgctcattgtaatgggcatccagaaagggctgagcacactgaatgtgttaaaccttgaaaacttttgggcaaattatgtggtatttttaattttggcctatatgattctgtcctttttccttcattatttttccaagcgaaaaaagcaatcataacatttctccagcggtttgcctgccgctggattttttattgttttttgctattttgcattgcaaagtagttcgttttttgataaactaacttgcataacaaagtagttgaaatgggggtggagggatgtccattcgaagccagttactgaaaggcattttagacggctgtgtgctggctgtgattgaaaaagaaccggtttatggctacattctttcaaaaaaacttcagcaaataggcctccaggaaattagcgaggggacgctttacccggttctgttgcgcctgcaaaagaacggctggatccatggagagatgcgaccatccgattccgggccaagccgcaagtattatgaattaacggagaaaggaaaatccgcgttagatgagattacaacagagtggcagcaaatcgcagcccctgttcaacttttattgaaaggaagaagtgaggatgcttagtgtaaaacagttgattgaggaaaacaaccgtaaacggcagaaactggcacctgagaacaaaaaattttacaacgatctgcttgtctaccttcgcctgcaaaccgttttgtccgagcagcaaacagaagaagtgctgatggaactgcttgaccatctgctcgaaggccaaaaagaaaacaagacagctgcgcaaatgttcggcggtgacccgaaagcatttgccgacgaaatcatcaggcagctgccgaaagaaaacaaacgcaatatggtttcttttacaatcaggataatgatcttgcttttggggattgatttggtcattaatggcattactgcttttgttgttgaacggttcttttccagacctttgctgccgttttatcctgtacccgcggccctgaacttttttattgccgggctatacgtgatctttgccatttggtatatctttcgtatcttgaaaaagagtttgtttaaggaaaagacaaaaaaggtgcaaatcctaacttttttgaaaatagatgccgtaatctttgttttactgggcggcgttattttgctggataaattcatgccaaaaatcggcccgtccttttcttatccgtggtggttgccgctcgttttaggtgtggtgagtttaggggtttactatagctgggagaaagcagcaaagtcccgggggatatagttctagcgtgcaataaatctgttgttcaaaagcccgtgtgcggtttcgccacgggttttgcatgcgccagctatgctgcacgcaattgcaaaaaaacagcggggatcgtgaaaggttcttcatcagattgatgaaagacaaaacgggcggccagtattctcgaactgtccctcattgaattgatgaaggacaaaaaaacaaggttgcaacagtgaactgtccttcattgggttgatgaaggacaaaaagggccttcaaatttccctccggggtcaattgatgatctcatacacgtgctcttttctgtatacaattgtatacgaattgtcgagaaaaaattgataacaaacagaaatgatagatagtaggaaaagcaatctttgtgatatactatttgaaaaaggaaggaggtaaaatgatggatgagattttgcagcaaattcttcatgaattgagagatttaaaaagtgatgtgtccggtttaaagagcgatgtttccagtttgaagagtgatgtgtccggtttaaagagcgatgtttccagtttgaagagtgatgtgtccggtttaaagagcgatgtttccagtttgaagagtgatgtttccagtttgaagagtgatgtttccagcttaaaagtagggcaggaacgcattgaaacgaaagtagacaaccttgctttggaactgcgaagcaattttaaattcacaaacgataaactggaagaacataaaagcatttttacagttgtttcaaatgaaatcaaaggcattaagggcgatattgagtttcttagcgggaaatccggcaagcatgacacagaaattaaccatattatgaatatgttaagaggttaatgtacatgcacccaacccgggggctttttgtttctacaagtagggcttgctgaacgaatcaaatttgtcttgtatctgaccaaatttgattcgttcagccagcccataaatagagcacggggggatgtagtgaaaaaattaaccgaagaaaaatttttgctcattttaaatgctgatgcgagaagccggttgctgacattttccgatctgcggaaatttttatgcgcattgtttgtttattctttggtgatgattggagtcgcatacaaagttgtaaatggcggaaatatcggatgggaaaacttgtctcctttttggcaacgggtatttcgccttgaaatcctgttgtttatcgtgcatgtactttcaatccttttatctattccgagccgtcctttcagctggaggttctcaagtattgccgccgttatttttatgtacaaggctgcgtttgacgcatttgttgcatttatgatgttagcaaaagacaagcatattgatgatgtttacgtctggacgacgctgtacagtatagcggcttgtgtgctttttcatcttttctttctttatttttggatcagaaaaaggatccatctgcaggagatcggcaatctagaggtaaaaacgtacaacaaggaaataagcgcttctattatcggattttttgtcgttttgtcttccattcagttaaacaaagtgccgatcggttacggccggcataaaaggaatctagcatccttcattgcaactgtaaacgggttggaaaagccggtgcacatataaaaggagcagctctttccgctcccttgttacacctgtcccagcccctgcttgagcgtttccagcatcattttttgttcctgtgtatccgcatggttccaaatgacttcaaagaggacgccgagccccgggagcattttttcttcgcccctttgaatggcatcgacaatcgtatcttttaactgatcctgcgtgtcatcttttacattgtgaatgactgctttccgcaagtccaaatccatttcggttcagctcctttgatcgtttcactgctagcatttcacatggccactatttttatgtatactattccaaggaaaacttaacgaaaagggagcaaacacgttgaaatacatacaatccttgcaaaatccgcaagtaaagcattggaaaaaactcgccgcgaaaaaagaacgcgaaaaaacatttacttatttgctggaagggttccatcttgtcgaagaagcgctgaaagaggaagtggtggcagaaatcatcgttgaagaaggcgtagacctgccaaaccgctggaatacggaaggggtgccggtgataactgtcacgcatgaaatcagcaaaacacttgccgatacagaaacgacgcaaggcatttttgccgtgtgccggatgaaaaaacagccgtccaaaatcatcggcaggcgttatcttttaattgatgccgtgcaggatcctggcaataccggcacgatgatccggacggcggacgcagccgggtttgatgccgttattttcggcaagggcacggcggatccgtacagcccgaaagtgttgcgtgcggcacaaggaagccatctccacgtcgggcttttaaaaggcgatttaaacatgtggattgaaaaactgaacgaagcggcagtgccggtttacggaacagcgcttgaaaacggcgtaacttttcgcgatgtaaatccaggcgatgcctttgcgatccttgtcggcaatgaaggaagcggcgtacaccccggcttgcttgcgcaaacggaacaaaacctgtccatcccgattttcggcaaaagtgagtcgctgaatgttgcggtggcagccggcattttaatgtatgactttgcaatgcgggcgtaacctttggcggaaataatggatgccacctttgctgccccgtgtttgaggcagaaaagcaggccttatccatgcggtgaacgcggcaccagaagaagatgaaaaacagccggcaccatttttcaggataggcgccaaaaggcaatcgaggcagacgatttttcatgagggcggctgcgttgtttggccaggataaacagggaaaaccgcgtggccaaagcgtccatttattgcggaaaacgagaaatattccgtgccaaaacggccgggcccatgcctattttcactttccgtttgaaattgcgggcatttcccgctataataaaaaataactgaaaaatgataaaaaccatgacagggaaaagtagcttgatcttcgccatgcagggagaaaatgccgtagactggaagcatttttatggggaaatgaagcgaagttcacccctcgagttgccgcttggaccattgcttgcaatgtaaaggcgggacggttaaaagccgttattgaaatgaagcgaacataatttagttatgttaactagggtggtaccgcgaaccattagcctcgtcccttttccagggcggggcttttttaacgcccaaaacctaaaggaggtacaaaaaatggaagaaacgttgaaagcactgcaaaccgaagcgcttgccaaaattgaagcggctgctgatttaaaaacgctgaacgggatccgtgtcgcctatctcggcaaaaaaggcccgattacggaagttttgcgcggcatggggaagctgccagcggaagaacggccgaaaatgggcgcgctcgccaatgaagtgcgtgccgccattcaagcaggtattgaaaagaaacaggcggcattggaagcagaagccgtcgagaggcaactggcatccgaaaaaattgatgtcacgctgccgggccgcccggtaaaagcaggcagccaccatccgcttacaaaagtcattgaggaaatcgaagacttgtttatcgggatgggctataccattgccgaggggccggaagtggaaaccgattactacaattttgaagcgctgaacctgccgaaagggcacccggcacgcgatatgcaggataccttttacataaccgatgaaatgctgcttaggacccatacttcaccgaaccaggcgcggacaatggaaaagcatcacggcaaagggccggtcaaaatcatctgcccggggaaagtgtaccgccgcgacaatgatgatgcgacacattcccaccagtttatgcaaattgaagggctggttgttgacgaaaacatcacgatggccgatttaaaagggacgttggaagtatttgcgaaaaaattattcggcgaagaccgcgaaatccggctgcgcccgagctttttcccgttcaccgaaccgagtgttgaaatggatatttcatgcaagatgtgcggcgggcacggttgccatgtatgcaaaggcaccggctggattgaaattttgggcgccggcatggtccacccgcgcgtattacggatgtccggctttgatccggaaaaatataccggttttgcattcggcatggggccggagcggattgcgatgctgaaatacggcgttgatgacatccgccacttttatacaaatgacattcgttttttacggcagttttccgtacaagaataaggagggtcaaacatgtttgtttcatataaatggctgcaggaatatgtggatttggacggcatttcgccggaagaattggctgaaaaaattacgcggaccggcattgaagtcgaaagcgtggcatttaagggggaaggcattaaaaatgtcgttgtcgggcatgtattggaaaaagaaaagcatccgaacgccgataaattaaacaaatgcctggtcgatatcggggaaggcgagcctgtccagattatttgcggcgcgccaaacgtcgataaagggcagaaagttgctgttgccaaaccgggcgcctggctgccggggcatgtgaaaatcaaacgttcgaaactgcgcggcgaggagtcgaacgggatgatctgctcgctgcaggaactcggtgttgaaagcaagctcgtcccaaaagagtacgcaaacggcatttatgtgttcccggatgatgtggaagcggggcaggatgtgctgccgcttttaggattggatgacaccattatcgaactgggcctcaccccgaaccgggcggactgcatgagcatgctcggcgttgcctacgaagtggcggcgatactcgggaaagatgtgaaattgccggaaacaaaagtgcaggaagcagccgataaagctgctgatgccatttcggtccgtgtcgatgcaaaagaagcggcgccgctttacacattaaaagtcatccgcaatgtgaaaatcggcccgtccccactctggatgcaggcacggctcatggcagaaggaatccgcccgcacaacaatgtggtcgacattacgaactatattttgctcgaatacggccagccgctgcatgcgtttgactatgacaagctcggttccaaagaaattgtcgtccgcatggcgcatgaaggggaaaagatggtgacgctcgatggccaggagcgcacgttaaaagacgtccatcttgtcattacgagcggcactgaacctgtcgcaatggccggtgtcatgggcggcgccaattcagaagtaaccgaaacgacggcaaacgtgcttttggaatccgcctattttgatgccggaacgatccgcgcggcttcaaaagaccacagcctgcgcagcgaggcaagcagccgctatgaaaaaggggttgatccgaaccgcgtcctgcctgcatcagaacgggccgccatgctgatcagcaaatatgcgggcggggaagtgctcgccgggacggttgccgaaaaccatttgcatattgagccggctgttgtcaccattacgctagaaaaaatcaaccgtgtgcttggaacgcaaatttcagcggaagaagtgctccgtattttcaaacgcctccggtttgaagcatcatgggaagacggccgttttaccgttattgtgccgacccgccgcggcgatattacgattgaggaagatctgattgaagaagtggcgcgcctgtacggctatgacctgctgccaaagacattgccggcgggcaggggaacgcgaggcggcttgaacgccatccagcaaaaacgccgcgccacgaaacgtttccttgaaggagcggggctgtaccaggcaattacgtattctttaacaagcgaagaaaaagcacaccagtatgcgcttgaaaaacgcgaaccggtccgcgtcgccatgccgatgagcgaagaacgcagtgtgctgcgcttaagccttttgccgcatcttttggaatctgtcgcgtataatgtcgcgcgtaaaaacgagtcggttgcattgtatgaagtcggcaatgtctttttaaaaaaggcggacggggcacagccggaagagcaggaacacctcgccggcgccatcaccgggctttgggttgccaacttgtggcaaggagaaaagaaagcagttgatttctttgtggcaaaagggattttggaaggcctgtttgaaaaattcggggtctcaggcgctgtttcctaccgcgcggccgcatttaacgggctgcatccgggaaggacagccgaaattttgctggacggggaagcaattggttttgtcggccaggtgcatccgaacgtgcaaaaagaactcgatatcaaagaaacatacgtgttcgaactgaaactggagccggtgtacgattacccggccgaaccggtccaataccggccgatcccgcgcttcccggccatcacccgcgatattgcgcttgttgtcgaccgcgatgtggaagcagcccggctgcaggcaatcatccgggaggccggcggaacccttttgaaatccgtttcgatttttgatttatatgaaggcgggcatatggaacccggcaaaaaatcaattgccttctcgcttacttacttcgatccggaacgtacattaacggatgaagaagtcgtcgcccggcatgaaaaagtgctggatgcggtaaaagaaaaagcaggcgcggtgttgagaggataagggaatggaaaaagggggaatcgcgggattcctcctttttccatttaaccgtcattgttttttatccggaaaatcaattgatgatcatgaatgaagcaggatgaaagcaaaaatgcaatgcaagtgctgattgccgacgccgcccaaaaactgtttaacccgaggacaggcagaaagagggcagtgagtgcggttttgaaaaaaagatccgaaaaattggagagcaaaaacagcttcattttcgcgtaccctcttagaatgctttcattcacgttttttagcgcggaaaataaaatcatgatgcagctgtattttagataggaggtgccaaagccggcagcatcaggatatttttttgcatccaaaaagatggataagatttgcttatcaaacacgaaatccgcgagtgtcagaaaaagaacgtaaaccgtggcaaaccggatgcaaaaccggtatccttccaaaatcctgccaaactgtttcgcgccgctgttggccgctgtaaaaatggtcagtgtctggcaaaaaccgatcatgatgagcataaaaaaagtgaggattttattcaccgcaatatacccgctgatgatttcgctgccatagggattaacgaatatttgcaatcatagtgcagataaagtgaccgctaaagctgctgtgacaataaatttaaaatattgggaatggaaaagaggagaaatcccttttttacgggaaacgctgtaaagttcacaacaggagaatttgcccggctgtgcagagtgaataagaaaactttatatgattacgatgaaaccggcttattaaaaccggcagtccaggatgggaatggttaccggtattatacggaagaacaaatcgatcagctgagcaaaatcaaagtcttgcagtctgtcggtctgtcattggctgaaataaaaaagcagttccatcaggaagatgtagcggaaagcatccggacgctcgctaaccagaaaaatgcgatcacaaacaaaattcatgatttggagcagttagcgcaaacattgggccggaagctggctgaacttgaacgttttcaaaagatggggagcctgaaggtctttatcgaaacttgtttggaagaatacttgattattcgtgaacagtccgggccgtttgttgtcaattacatgctggaaggataccatgcaggtgtcatcatcagcgggatgaaacaacctgcatcggaaaagaaaacgtggaaataccggaagacggatgaccggaaagatgccaactttttgaaaaaagcaggcaagtttgccgggctttattttcttgcggaagatcaaaaaatcaatgaggctacagaaaaagcttacggcttgatctgcaaagaaacggaaacggcgggcaacgagatttaccttgaagatgttgccaatgattttcttttgtttccggacgggaaaatattatttaaaataagtgccatggcaaagtgagttctggcttttttcccaaaaaaggagccagctttggccggctcctgtcggaacgggcttcagctgattcccgcaatccttttcgctttttccgtattggcgaaatgcagtttgacaaaatgcggcagcgcggccatgcctttttccttgatgagccgcgcggcagcctggtccacctgtgcgccggcgccctttggcaaaacaaagccggcttttttgcttaatttttctaactcccggacaaaagcatagcgtgcgagaatggaagcggctgcaaccgcaagatggacgctttccccttttgtgctgaaatagacgccgtcgcgcatgacgattttttcgttttgcaaataccggtaatacgtggatgcttccgcgaactgatcaattaaaattgcatccggttttgccggcgcaattttttgggcggtattgtacaaagcccggttatggagcaatgctttcatttttccttgcgacatgcccgattgttggagccggttgtatttttcgttcggcaaaatgagcaggctgtacggaataaaggtgagaagctctttcgctattccggcaatctggctgtctgttaatccttttgaatcttttacgcccagttcttttaaaagcgggagctgccccttttcgacgtaacagctgacaaccgtaatcggcccgaaaaagtcgcctgtcccgacttcatctgacccaatgacggaaagctgcccgatattaggaggcagcgggttgccggaagattttgcgcgccgggcggcatccggcttcttttccggcggctgtccccattttgacgcttccgtttctgcggtcggcccttgaaataaaacttttccggacttatagccggtaatggagcagcccggtatttttgcggcaaaaacggcgccgggcggaactttccccgtcaggctgttctggtaagattgtttcattttttgcatggttgaagcagaaacgagaatgacagtgttttgcattttgattcctccggcagtttcaggatctccgtgaatttgttcgacattgttagacaaaggcttttccgccatgctatgatagagaataggattcttacaaatggggaggcaggcaacattggaaaaaacccgaattacagttggcatatacggacagcaatataccataatcggaacggatccggcaagccatattcgcctggttgcctcgatggttgatgaaagaatgcgggaaatcagcgcgaagaatccttcattagataccggcaaagtggctgtgctgacagccgtaaatgctgtccatgattatataaagctgaaagagcagtatgagctgcttgaacagcactatttacaattgctgaaaaaggatgaagatgaaaatggttaatatggccatcatcattttgcttgtgcttggattcctgaacgggaagcggaaaggatttatattgcaggctgtccatattacagggtttgtaattgcctccgcagttgcgtacatattgtatgatgacctggcggaaaaattgaagctgatgattccgtatccttcttttaacagagacagctcatttgcccttctgatgcacgaaggcaatatggaaacggccttttaccggattattgcgtttgccatccttttctttgctgtcaggattattctgaatattgttgggtcatcccttacttttttggcccagctcccggtcctcaaacaagtcaatggatgggcgggcggcatcctcgggtttgccgagctgtacctgatcctttttatcgttttatatatcggatctttgctgccggtggatgagatccagtccgcgctcaagggatccgcagtcgcagaaggcatgattaaaaatacaccttatatttcagctcttgtggcgtcatggtgggtgaaatagaaacccggccgtcacgtttaccatttgcaaaacgggttggaaacgggtttttcaaaacagcacttctcgcggcggggggagtgtttctttatggacggggccgggatgccgggctcggatccaagcactccccatgcttccaggaaaaaaggcgcggccattggaagggcgctttttaatcaccgtggcgggtaaacggtaaaaacccgatccttcacttaataagttaaaaaaagggggcaggcgaatgcggacgaataaacgcagtgtcatccggctgctggaacaaattgcggtgtacttggaattgaaaggggaaaaccattttaaaatcgcggcttaccgcagggctgcatccgcattggaagcggacgggcgcgacttgtcggaaatcagccgttttacggatatcccgaatatcggaaaaacaaccgcttccgtcatcgaagagttcgtggaaacagggcggtccaccctgcttgaacaattaaaagacgaagtcccaaaagggctggttccgctcatgcagatacagggcctcggtgccagaaaaatatcaaggctttacagggagctcggcattacagatgcggattctttacgaaaggcttgtgaagaaggaaaagttgaaaggttaaaagggtttggaaaaacgacgcagtccaatattttgcacgcgcttgaccagctttcagggaaaccggcctataccatcggccggctgctgccggttcttctgctgatcgaagaaacgctgtccggaaacaggaaaatagaaacctattcgcgcgctggcagcatccgccggtttgaagaaagaatagaagagctcgattatgtcatctccacattcgatccaaaatcggttgcggaggacattcttcaaatgaacgaagtcgtggaagctgtttcgatccggagtttaaaagtgacggctaaattaaaaggggaagccggcttgcggatcaacttccggatcgcaaagcctgacctgtatgcgctggcgctttttctttcaacagggccggagccgcatctggaaaaaatgcagcagattgccggccttcatggcgaacggctgacaaaatccggcgtcaaaatcctgaagacgggcgaattgctccgttttccgagcgaggcttcgttctatcatcattatgggctgccttacatccccccggaaatccgcgctgacggcagcgaagtggaaacctataaggggacgccttttgtccagtttgatgatataaagggcgacctgcacatgcacactgtctggtcggacgggaaagattcgcttgaagacatggtcaatgcatgcagaaaaagagggtacgaatatatcgcgatcacggaccattccaaatatttaaaagtggccggcgggctttcacgtgaacgtttgatcaggcaaatgaatgaaatccgccggttaaatgagaaatatccggatatcctgattttatccggcattgagatggacattttgccggatgggactttggattttgatgatgatgtgctgtcaggcctagatttcgtcattgcttccatccattcgggttttgggaacagccgcgcgcagatcatgaaacggctgcacagcgctttattcaacccgcatgtggacatgattgcccatccgaccggaagattaatcggcaaaaggcaggggtacgatgttgatttggacctgctcttccaatgggcaaaagaaaccggcacgatccttgaattaagcggcgatcccgcccgattggacctgtccgcggcccgtgcacgagaagcgcaggcggccggtgtgaaaatcgcgattaacaccgatgcacacgcaaccgcggaactgggcaatatcgctttcggtgtcgggaccgcgagaaaaggctggattgaaaggaaaaatgtggtcaatacgtatacgaaagaacaactccttgattttttaaaacagaaacatcagcactgacccattcccgttctgcaatgaaaagagggcagttttccgaaacgctggaatccggaatgcatggaggacgaatagatgcaacataaaatcatcaaaacactcgagtttgataaaattaaaaatctgctgcttgcgcacgcttcttcaccgcttggggccgaaaaaattgaagcccttttcccctcctcttcctacgaagaagtggtccggatgcaggaagagacggatgaagcggcacaagtactgcgtttaaaagggcatgtgccgctttcaggcatttatgacatccgccgccacctgaaaagagcggcgatcggcggcaggctgaacccgcaggaactggtgcagattgcgagcaccatccatgtcagccggacgatgaaacggtttattgaaggaatcgcggaagaagaaacagcactgccgatcttaaccttaacaagtatggcggacagaattgcggtccttactccgcttgaacatgacatccggaatgcggtggatgaaaacggggaaatactggacactgcaagcgaaacgctgcgccaaatccgccacgggctgcgcggcacggaacggcgcatccgtgaaaaactggaaggctatattcgcggcaaaaatgcggcgaaaatgctgtcggatgcgattattacgatccggaatgatcgctatgtcatcccggtaaaacaggaataccgggcaaattacgggggaatcgtccatgaccagtcttcttccgggcagactttgttcattgagccgcaatcggtcgtggacttgaataaccagctgcgtgaatggcatttaaaagaacagcaggagattgaaaggattttaagcgaattgtccgccgcagtggcagcagccggcggggagcttaacactatcgtcgaaattctcgccgattttgactttatgtttgccaaagctttatacggccggtccattaaaggttcgaaaccggtgatcaacaaccacggcgccatccgtatgttcaaagcgcgccatccgctgcttccggctgataaagtggtgccgaatgatattacgctcgggcaggattatacgacaattgtaataaccggcccgaatacaggcggaaaaacgattacgctgaagacaatcgggctgtgcacgctcatggcgcaggccgggctgcaaattcccgccttggacggttcggaaatggctgtttttaaagaagtatttgccgatatcggtgatgaacagtcgattgagcaaagccttagcaccttctcctcccatatgacaaatatcgttgaaatcctgaaacgggtcgacgatcagtcgctcgtcctgtttgatgagctcggcgccggcaccgacccgcaggaaggggctgcccttgcgatttcaattttggacgaagtgtacaaaaggggggcccgcgttgtcgccaccacccactacccggaactgaaggcatacgcctacaaccgcgaaggtgtcgtcaatgcaagcgtcgagtttgatgtggaaacattaagcccgacataccggcttttaatcggcgttcccggccggagcaatgcgtttgaaatctcaaggcgcctcgggctctccccgtccgtcattgcacacgcccaatcattaatcggcgcggacacgaacgaggtcgaaaatatgattgccgcgctcgaatcggcgaggcgcgaggcggaaaaagaacggcaggaagcgcagaaactgttggaggatgccgagaggctgcaccatgatttgcaaaaacaaatgagacagttttatgcccgccgcgatgagctgtatggaaaagcggagaaaaaagcagcaaaagtggtggaagaggcaaaggaaaaagcggaagagattatccgcgatttgcggaaaatgcagcttgaatccaaagccaatgtgaaagaacatgaactgattgatgcaagaaaacagctggaggaactggcgccgaaactggaccgcaaaccggcggcaaaggcaaagaaacagcatgtctaccagccgggcgacgaagtcaaagtgctcagtttcaaccagaaaggcacgctgcttgaacaaacggcaggcggcgagtggctcgtgcaaatgggcattttgaaaatgaaagtaaaagaatccgacatggaatatatccggccgccgcaacaaaaacagccggagaagcacctggcaacggtcagggggcgcgattcccatgtcagcctggaactcgacttgcgcggggagcgttatgaagatgcactcttaaaagttgaaaaatatattgatgatgcgcttttagccgggtatccgcgcgtttcgatcatccacgggaaaggaacaggggcgctccggaacggggtacaggaatttttgaaacatcaccgcgccgtaaaacgcatccgccttggggaaccgggcgaaggcggcagcggcgtcacgattgtagaattcaagtaatcttcaagggcaagggggagggccttttgtttctcgaaaagctggcaaaggttttgcttgtttgctgtgctgtttttgcattgtttggcgtcatttatttgtttgttgcagattagcccgtaacaaggagaaggagcgcatccttctcctgtttcggctgcaaacaattgtcagcggtttcaattttcgttataataaaataagtcaataaaaaaatacaaaaatggagttgatgcaaatgacagacaggccatggctgtcccaatatccgccggaaatacccggttctcttacgtatccgcgaaaaccggtttgtgcatttttaaccgaagcagctgagcagtatcctgacaaaaaagcgctccattttatggggaaagaaatgacataccgtgaagtgtacgaagctgcgctcaaatttgccgggtatttaaaaaaactcggagtggaaaaaggcgacagggttgccgtgctgctcccgaattccccgcaggccgtcatcgggttttacggcatcctttacacgggcgggatagccgtcatggcgaatccgctgtatacggaaagggaactggaataccagctgaaagactccggcgcgaaggccatcctgacggttgatttcctgtatccggcagtggcaaaagtgtttgagaaaaccgatctcgaacatattattgtaaccgctatcagcgattatttgccttttcccaaaaacgtcatctacccgtttatgcagaaaaagcaaacgggcgtcacagtacgggttcagcacggcgggcaccatcacttgctaaagaacatcatgaaggaagaaattccggaaccgcttgacacgccgttcgatatcgaagaggaccttgcgattctccagtacaccggcggcacaaccggcgtgccaaaaggggttatgctgacgcatctgaatttgattgcaaacgcgacgatgtgcgatgcctggatgtacaggaccaaaaaaggagaagaagtggtgctcggcatgcttccgtttttccacgtgtatggcatgacgaccgtgctgattctttctgtcatgcagggctttaaaatgattttaattccgcgttttgatgcggagtcgctgctgaagacgatcgaaaaacagcggccgaccctgtttccgggtgcgccaaccatttatatcgggcttttaaaccacccgaaaatcaaggaatatgatttgtcatcgattgaagcatgcatcagcggttctgccccgctgccggtagaagtccagcagaaatttgaagaggtaaccggcggcaagcttgtggaagggtatggcctcagtgaatcgtctcccgtcacccatgccaattttgtatggggaaaacgcgtcaaaggtagcatcggcgtgccatggccggatacggactgcgaaatccggtcgctcgaagacggcaggccgttgccgcccggtgaagtcggcgagctggcggtaaaagggccgcaagtgatgaaaggctactggaaccgcccggaagaaacgcaggaagtgctgaaagacgggtggctgtttacgggggacctggcttatatggacgaagaaggttatttttatattgtcgaccggaaaaaagacatcatcattgcaggcggctataatatttatccgcgcgaagtagaagaagtgctgtatgagcaccctgccgtccaggaagccgtggtggccggcgtgccgcacccgtaccgcggggaaaccgtcaaagcctatattgtgctgaaagagaatatggcagtaacggaagaagaactggaccggtttgcgcgccaatatctggcggcctataaagtcccgcgcatttacgaattccgggatgaactgccgaaaacggccgtcgggaaaattttgcggcgctcattggttgcagaagaaaaagaaaagatggaaaatgaaggagagaagatcggttaaggaaaattttttataaacaggacttgacaaatgctgcattcctgtataatatgaaaatatgaatgaatggtcattcattttccggccgccatcaaaccggccggccaaattgacagatcatgagattgaaaggtgatagcccgtgaggaaaaacaggccaaagtacaaacaaattattgatgcagcagtggtggttatcgcacaacacggctatcatcaggcacaggtttcaaaaattgcaaaacaggcgggcgtagcggacggcacaatttatttgtattttaaaaacaaagaagatatcctgatttctttgtttgaagaaaaaatgcagctgtttatcgaaaaggtttccgaatatattgcaggggacctttccccttccgaaaagttgctcaagatgatcgaaaaccacttcaaagtccttgccgccgaccaccatttggcggtcgtgacccagctggaactgcggcagacaaatttagacctgcggcttaaaatcaacagcgtgctgaaagaatatttgacgctctttgaccaaattatccgcgaaggcatggaaaaaggcgaattcgattccgggcttgacgtccggctcgtccgacagatgattttcgggacagtcgatgaaacggtgacgacatgggtgatgaataaagaaaaatacgacctcgtttcactggctgctcccgtccatcaattgatcattaacggctgcggcaaaaaaacggcggtttaattgccgcagctttcacaagggggttggagacgggatggaatttattacgatcaaacgggaaaatgcggttgcctgcattgaaatgaacaggccgcccgccaacgcgcttgcgcaggcccttttaaaagaacttgcgcaagcgtttggccagcttgaaaacgatcctgaaacccgggtcgtgctcctttacgggaaaggaagatttttctcggcgggagcggatattaaagaatttgtccaattaagggaatccggcggctccgatgcgatagcggtttccggccaggaattgttcgaaaaagtggaagcgttcccgaaaccggtcatcgccgcaatccacggcgcggcacttggcggcgggctcgaacttgcgatggcatgccatatccggcttgtcacagaaaatgcgaagctcggccttccggaactgagcctcgggcttgtgccgggttttgccggaacgcagcggctgccaaagtatatcgggcgcggcaaagcgtttgaaatgctgtggacaagcgaaccgctgaccggaacggaggccgtgcagcaggggcttgcaaaccatgcttataaggaagaggaactgctcccgaaagcaaaggcgctggctgaaaaaattgcaaagaaaagcccgctggccctgaaagcctctattgaactcgtcaattatgcaaaaacaaatgattacgaaaaaggcttggagcaggaatccgcacgttttcttgagctgttcggctcaaaagatgcagaggaaggtatcaaagcttttattgaaaaaagggaaccgcgttttacaggggcataacatttttattttgtatgcgcttaaatgattttattttttaacgattcagggagggaacggcatgaatatcttcgtattattaaaacggacctttgacacagaagaaaagattgcaattgcaaacggccgcatccaggatgacggggcggaatatatcatcaacccgtacgatgaatacgccgttgaagaggccatccaggtgcgggatgcccagggcggcgaagtcacagtggtcacagtcggcaatgaagatgccgaaaagcaattgcggacggcgcttgcgatgggtgtggataaagcagtcctcattaatattgaagacgatgtggaagcaagcgaccaggtcacaacgtcaaaagtgcttgccgcttatttgaaagagcaggaaccagacctcattatcggcgggaatgtcgccattgacaacgcttccggacaggtcggaccgcgggtggcggagttgctcggcatcccgtatgtaacgacaattaccaatctggaaattgacggcggcaaagcgacggtcacaagagatgtcgaaggggattccgaaatcattgaaacggaccttccgcttctcgtcacagcgcagcagggcttaaatgagccgcgttatccttcgctaccggggatcatgaaagcgaagaaaaaaccgcttgaagaactggaactggatgatcttgaccttgaagaagaagacgtggagccgaaaaccaaaactatcgaggtttacctgccgccgaaaaaagaagcaggaaaagtgcttgaaggcgaaatcgccgaccaggtaaaagaacttgtccaattattgcatgccgaagcaaaagtgatttaagcgaagaaaccggaaatggaggggatcagcatgagtcgaaaagtattagtagtgggcgaagtccgtgacgggtcgctccgcaatgtatcatatgaaaccattgccgccggaaaaacggtagcggaaggcggggaagtagtcggcgttttgatcggggacgctgtgaaagatttggggaaagacatgattcaatacggtgctgaccgtgttgccgtggtggaagacgagaagctgaaaagctattcttcagacggtttttcccaagcattgcttgcggttgtcgaatctgaaaagccggacggcatcttaatcggccatacggcgcttggcaaagacctggccccaaaagtagcggctaaattggatgccggcctgatttcggatgcgaccgcagtggaatcagccggagaacatgtcgtctttacccgcccgatttactccggcaaagcgtttgagaaaaagatcgtaacagacgggatcatctttgcgaccatccggccgaacaacatcagcccgcttgaaaaagatgaatcgcggacaggggatatcgaaaccgtccaggcggaaattaaagatttgcgcacggtcatcaaagaagtagtccggaaagtaagtgaaggggttgacctttcggaagcgaaagtcatcgtttcaggcggccgcggcgtgaaaagcgcggacggcttcaaaccgctgaaagagcttgccgatgtgctcggcggcgcggttggggcttcgcgcggcgcatgtgacgccggatactgcgattattccctgcaaatcgggcagacgggcaaagtggtgacaccggatttgtatatcgcatgcggcatttccggcgccatccagcatttggccggcatgtccaactcaaaagtcattgtggccattaacaaagatccggaagcaaacatcttcaacgtagcggactacggcatcgtcggcgacctgtttgaagtggtcccgcttctcacggaagaaatcaaaaaactgaaagtcacatcggcgtaaatcccgggcccggacgaaaaaaatcgttccgggcctgttttctgttggatattcgcggaaaaagggtataaaataataaaatcattactgcttacctggaccggacaaattgttcgcaacatatgataaaggatgatatactaatcccaagcagtaatagtttgatttaggagggttctttcaatatggcaattacacatgctaccgacgcgactttcgatcaggaagtcagccaaggtttggtattaacggatttttgggcaacatggtgcggcccgtgcaaaatgattgcaccggtacttgaagaaatcgatgctgaaatgggcgacaaggtgaaaattgtcaaagtggacgttgacgagaaccaggaaacagccagcaaattcggcatcatgagcattccgacccttgttctcatgaaagacggcaaaccggtcgacaaagtgatcggttaccagccgaaagaagctttgcaagaattagtgaacaaacatttataatacaataaacgcgcggcttcaagccgtgagcaaatgcatttaaaatccggaccggctgtggtccgggttttttacagaacgcaggattttgaggtgaagaaaaattgaacgaaacgatccgcaataaacttgccctcctgcccgcccagcccggctgctacttaatgaaagacagacaggggaccatcatttatgtcgggaaggccaaaattttaaaaaaccgtgtccgctcttacttttccggttcgcatgacgcaaaaacgcagcggcttgtcagcgagatcgaagactttgagtatattgtcacttcttccaatattgaagcccttattcttgaaatcaacttaatcaaaaagcatgacccgaaatacaacatcatgctaaaagatgataaaacatacccgtatattaagctgacccatgaacgccacccgcgtctgatcaccacccggaaagtgaagaaagataagggaaaatattttggcccgtatccgaacgtgcaggcggccaatgaaacaaaaaagctgctggaccggttgtatcctttgcggaaatgcaccaatatgccggaccgcgtctgcctttattaccatttgggccagtgccttgcgccgtgtgtcaatgaggtgaaagaagaaacatacaaagagatcaccgaccaaattacccgctttttgaacgggggctacacggaaatcaaaaaagaactggaagaaaaaatgcatgaggctgctgaaaaacttgaatttgagcgggcaaaagaataccgcgaccagatcgccaatattgaaatgacgatggaaaaacagaaaattaccatgacggattttacggaccgcgacattttcggctacgcagtggataaaggctggatgtgtgtccaggtgtttttcatgcgccaaggaaagctgattgaacgggatgtctcgctttttccgtcttacgatgagccggaagaggaatttttgagctatttggggcagttttacgccaaaccggagcatattaagccgaaagaagtgctgattacggaaaaagcagaccgggaactggcagaacaactgctggaaatcaaagtgctccagccaaaaaaaggccagaaacgggaacttgtgttaatggccgagaaaaacgcaaagattgctttgaaagaaaaatttgcgttgattgaacgggacgaggaacggacgatcaaagccgttgaaaatctaggcgaaaagctcggcatctatacgccgcaccggattgaagcgttcgataattcgaatatccaggggacaaacccggtttcggcgatggtcgtgtttgtggacggcaagccggcaaaaaaagaataccgcaaatataaaatcaaaacggtggaagggccggatgattatgaatcgatgcgcgaagtgatccgccgccgttacatccgtgccctgagggaaaacttgccgcttccggacctcatcatcattgacggtggaaaagggcaaattgacgcggcaagggatgtgctcgaaaatgagctcgggcttgagattccgctcggcggcctggcaaaggatgagaagcacaatacatcgcagcttttgttcggcaacccgctggaagtcgtgccgctcgggcggaacagccaggaattttacctgctccagcgcatccaggatgaagtgcaccggtttgcgattacgttccacagggaattgcgcggaaaatccgcatttcaatcggcgcttgacgatattccgggcatcggaccgaaacggaaaaaacaactgctccgccactttggttccttaaagaaaatgaagcaagcgaagttggaagaatttgtggaagcgggcatcccgcgcccggtatccgaaacattaatcaaaaaattacaagaataacctagcagggtttttccgtatatggtataatcatgataatttcatatggcaggctttgtttcagactttcgggagcggatatcccggcgtccggcaaagccgttacatgatagaggcgcaaaacttaagagtaaggaacgggagaagattgggcttccgggatcgttcctgaaaggaagttttgccgaagtggaaatggcctcaatgccgtttttgctggttctgtactgaagaagtccggaactgtcaggatgaaatgtcttggagcgctatctcacaggaataactgcgtacccgcgtatgcaaaagcgatgagatatccgttctcattgcttttttttaaatgggcgccaagttgctttgctttcaatctgacagcctcatcttacttataaactgcagaaggtggcggagttattgggaatcattgttcagaaattcgggggaacttcggttggaaatgtggaaaggatccggaatacggtcgaccggattattgaagaaaaggaaaaaggccatgatgttgtcgtcgttgtctccgcgatgggcaaaacaacggaccagcttgtcgggcttgcaaatgaactttcggcgtatcctgcaaaacgcgaaatggatatgctgctttcaaccggcgaacaggtgacgatttcgcttgtcgccatggcgctgatcgatcgcggctacgatgccgtttcttataccggttggcaggccggcattataacggaacccgtgcacggaaacgcccggatcacggaaatccggactgaaaaaatcaaatcccgtctggcagccgggcaaattgtcgttgtcgccgggtttcagggcattaccccggaaggcgaaattgcgacgctcggcaggggcggctcggatacaacggcagtggcgcttgcagcagcgcttcatgccgaccgctgcctgatctacacggatgtaaccggcgtgtttacgtccgacccgcgctatattccgactgcccggaagcttaaggctgtatcctacgatgagatgcttgaactggcgagcctcggggcgggcgtcctgcatgcaagggcggtggagtttgccaaaaatgcggctgtgccgctgatcgtttgttcgagccttgaaagggaggaaggcacgttaatagaggaggaagtttcggtggaaaaaaatttaattgtccgcggcgttgcatttgaagacggcattacaagggtaaccattttcgggctggaaaacggcttccggaatttgccggatatattcacgacactggcggaacaccatattgatgtcgatatcatcatccagaaccggacggcggaccataaaacatatttatcattttcgataaaagataaagatctaaaagaaacggccgatcttttggaagccgggaaagaagccctcagcatcgaccattttgaaacggaaaccggcctcgcaaaagtgtccatcatcggctcgggcatggtttccaacccaggcgttgcggcaaaaatgttccaggttctggccgaccacggcattgcgattaaaatgatcagcacgtccgagatcaaagtatccaccgttgtcgatgcaaaagaaatggtccgggccgcccggtgcctgcatgaagcatttgaactggatgcagtggaacaaaatatatgaaaatatgaaaaagcaggggagccccctgctttttcatatttattcctcggccgggtctttcgcatcccactgcacggtgatccggattttttttgcctttttcgcaacttcttccacagcttccgtgatcagttttttctgcatctggtactgctcggccaaaaacccggcttcaagcttgaatgtcggttctgcgcctgcgcccatatccagctgccgttcaatcatcggcccggataactcaaattcaatatgatatttctcttcttttttgattgacaacgttccccagccggcctctttgaaaaaagaaaccatttcttcataggtaagcaactggaattttcttgccaaatgttttcccgcccagtacagaatatccggcgtttccttgccgagtatatccggaattaatatattgcgcaacagctcatatccgaatgtgggtaccatcagctgttccgcaacggtttgttcatttccgccagaagatttcacgcaattcccctctttctatatgctatattatatacaaaataaaaccggacttaaaagcattttttaagtatacacaaaaataaaaggaactttttccgccggtttccgcgttatacggggaagtggtaccggttgcggtaaaatccgatgaaaaaagacaagccttggataaaaattccttttttatgcaaaagcatatggcaaaagagctatactgaaaaaattttaaaaaaatggaagaaagactgacaaatatgacaaataaacggcattttcagcgcaaattcatgaatgcgtttccttgacgtgcccatttgtcgggagtacaataaaactgtcacataattgttataaaatatttatgcgggaggaagccatgcaaaatttgtcttctttgcataaattcacactacaaagggggatacaatgtggctggaaatcgagagttttataaccgcaaactgcattctttgctgggtgttgtacccatcggcttatttttagtcatccacttgaccgtaaaccactatgcggtaaacggtgctgctgccttcaataaagcagccggttttatggaaaacctgccgttcctgctttttgtggaagtagtattcatttatctgccgcttctgttccatgcaatttacggcttatacatttcgtttacggcatcgagcaatgtcggcacgatgggctacttccggaactggatgtacctattgcaaagaatcagcggtgtgctggtcctgatctttctcgtatttcacatctatgaaacacgcattcaaatggcgcttggcaaggaattgaattttgatctgatggcaaatcttttagcaaatcgttggatgctcgcctggtacataattgggacagtggctgccattttccactttgccaacggtctctggtcgttcctggtcagctggggcattacacagtcacgccggtcacagcaaatttccacatatgtgatgatcgtggtctttgtgctgctttccgttgtcggcgtcagggctttattagcatttgcataatgaaaagactcgaaaaatagcagtctactggtttgtaagaggcatcaagtatgaaaagggagtgaatcaagttggctaatggcaaaatcattgttgtcggcggagggcttgccggtttgatggcgactgtaaaaattgcagaagcaggccggcaggttgatctgttttctttagtgccggtaaaaaggtcgcactctgtttgcgcacagggcggcattaacggcgctgtcaatacaaaaggggaaggggattcgccatggatccactttgacgatacggtatacgggggcgacttccttgccaaccagccgccggtaaaagcgatgtgcgaagcggcgccggggattatccacttgtttgaccggatgggtgtcatgttcaaccgcacgtcggaagggcttttggacttcaggcgtttcggcggcacccagcaccaccgcacagcatttgcaggcgcgacaaccggccagcagcttttatacgcattggatgaacaggtaaggcgccatgaagtggacgggcttgtcacgaaatacgaaggctgggaatttctcggcattatcaaagacgatgaaggcatctgccgcggcattgtttcgcaaaacctgaccacaatggaaatcaaagcttttcctgcggatgctgtcattatggcatcaggcggccttggcattattttcgggaagtcgaccaactcgatgatcaataccggctcggcggcttctattgtataccagcagggcgcaacgtatgcgaacggcgaatttatccagatccacccgactgctatcccaggtgatgacaaactgcggctgatgagtgaatccgcacgcggggaaggcgggcgcatctggacgtacaaagacggcaaaccgtggtatttcctggaagaaaaatatccggcatacgggaacctcgtgccgcgcgatattgcaacccgtgaaattttccatgtctgcgtggacttgaaactcggaattaacggcgagaacatggtctatctcgatttgtcgcacaaagatccgcatgaactggacgttaaactgggcgggattattgaaatctatgaaaaatttgtcggcgatgacccgcataaagtgccgatgaaagtattcccggccgtccactattccatgggcggattatgggtggactataagcagcatacgagcattccggggctgttcgcagcaggcgaatgcgactactcgatgcacggcgcgaaccgcttaggggcaaactccctgctttctgccatctatggcgggatggtagccgggcctgaagctgtcaactacatcgacgggcttgaaaagagcgcgaatgcactgccgtcaaccgtctttgaacgtgctgtccaggaacaggagaaaaaatggaacgatatattgtcgcttgacggaaccgaaaatgcctatgtgttgcataaggaactgggcgaatggatgacagacaatgtgacggttgtccgttacaatgaccgtctgaagaaaacggacgaaaagattcaggaattaatggaaagatggaaaaatattaatgttgtagatacatcgaaatggagcaaccaggcggcttcgtttacacggcagctgtataacatgctgcagctggcgcgcgtcattacgatcggcgccctgaaccgtaatgaaagccgcggcgcccactataaacctgattttccggaccgcaacgacgaagaatggctgaaaacgacgatggcaaattatgaccctgtgaacaatgagccggttttcagctatgaagatgtggatgtatcgctgatcaagccgcgcgtgcgcgactacacgaagaagcactgattcggatcgggcgaaagcggactttttccggcttttgcccgggtgatttcataaggaaagaggagaataaggatgggtgaacaaaaaaccgttacatttatcatacaacgccaggataatccggaatcagaaccatacgacgaaacgtttgaagttccgtaccggccgaatatgaatgtcatttcggccctgatggaaatccgccggaatccggtcaatgccaaaggggaaaaaacaacacctgttgtttgggaaatgaactgtttggaagaagtttgcggcgcctgttccatggtgattaacggcaagccgcgccaggcttgttcagcgcttgtggacaaactggagcagccgatccgccttgccccgatgcggaccttcccggttgtaagagatttgcaaattgaccgcagccgcatgttcgactcgctgaaaaaagtgaaagcctggattccgattgacggcacttacgacttaggggaagggccgcgcatgccggagaaaaaaaggcagtgggcttatgaactggcaaaatgcatgacgtgcggcgtatgtttggaagcctgcccgaatgtcaacagccgttcaaactttatcgggccggccccgctttcgcaagtacggttatttaatgcgcacccgaccggtcatatgaaccgtgatgaacggcttgaagcgatcatggttgacggcggccttgccaattgtggcaactcgcaaaactgtgtgcaagtctgcccgaaaggtatcccgctgacaacatccatcgcagcgttaaaccgtgaaacaaccatttatatgtttaaaaaattctttggcagtgaccatacggttgactaatgccgaaagtgccacatcaaagcggaaacagtacgatgtggcgctctttttcaaacaaaaaatgaatggctgttcactcattaaaaggaggcattccattgaaaaaacatatctcttatattgatgactgggaggcctgggaagaaggattttcgttttatctcccggtgacggtccgtttttccgaaaccgatatgttcggccatatgaacaataccgttccgtttatttattttgaacaagcgcggattgaatttctccagcagctcgggtttatgggcgactgggcaaaaagaggcaccggatccatcccggtcgtggcggatttgcagtgtgattttttgcagcaggtttttttcaatgacaagctccgcatttatgtaaaagtctcgaaaatcggcaattcgtccgttgacttgcactatatggcgaaaaatgaagcggatgaaatctgttttaccgggcgcgggacaatggtgcaaatttcggccgcaaccggaaaaggaaaaccgtggacggcggaagaaaaagcgagattcgccgacccgcaagcttatgtctcatccggcaactgaacgaaagagtccatcccgccgtataatataaacttaagtgcgtgcgttggggattaattcgagcggagaaaagagcggcaatacgtggtattttttacaacaattgcttgcctgctttgccgtcttcgtacaggccataaacagaatccataactgccagtttacaatgccggataatgcttcattcttcttttgcacagaagggatttccggtatccgcccttttttgctgatttgtgctgttccttgcctcgccaagtcactcccggctgcgctaaaacataagatattgtgacaaccaaaatacccatccccgcggtttagagctggcgaaggcaaggagggttatcatagttgaaggacaacgatttcacacataaaccgctgctgacaaaaagagaaaaagaagtattcgagctgttagtacaagacaagacaacaaaagaaatcgcaagcgaattgtttatcagcgaaaaaacagttcgaaatcatatttccaatgccatgcagaaattgggagtcaaggggcgctcgcaagctgttgttgaattactccgcatgggggaattaaagctttgaaacaaaatcggctgcaatgttgcagtcgattttgtggtttaaagaggggggagagaaacggaaggatctgcggataaagcgtttactctttttgactccgatttttacatttttcatatttttagatgaagctggaaatttgccggcggttttagtaaaatggccacaagctcacgacacggaatcgttttcaatggtgcctttaaatgaaactccggccgacaatcgatcatgttagtaaaaggcggggcgtccagacgccggataccgtataaaaaatcacgaggcttacgaaaacaaacggcgttgttatctcaaaagacggcattaaaattttttccaaagccctcatgaggcagtgtgaagttttctccaaagacgttggacgatttggctttaaatcaaacgctgctgcacccaaatttgcaaacagacgcccatgccgaatgaatgcggcaccagcagaaggatgaaagccagccggcgcatattttcaggagagattaatagatttatccgcaaacatcgcaatttaacggctttccgaannnnnnnnnnnnnnnnnnnnnnnnnnnnnnnnnnnnnnnnnnnnnnnnnnnnnnnnnnnnnnnnnnnnnnnnnnnnnnnnnnnnnnnnnnnnnnnnnnnnataagtggagggtagttcaccatacaggcggacgatgctctgccggcattttgtttccggcttttcccacatgaaaacatccgccaaaatacagtacaatcgcatgaaaggatgtgtgttgatgcggcttgctgcatttgttccgattgccattttactcgggatgattgttccgccgttatatacggttgctgtcggggaaccggtcaaattgcgaatggagccggtggacccgacggatgccttcaggggcgattatatacaggtgaatcttgaagcggaaacggtgccggaaagccgcctggaccgcagtgccatcgagtattttgcgcgccataaaggcggggagctgaccgtgtatgccctgcttaaaaaagatgaggcaggcatctgccatgtgaaaaccgtatccgccgaaaagccgcggggcggaatatatttaaaagggaaagcttgggaagacggcgatcaaaaagtgtatattgattatcatcttgacaaattttttgtgccccagcatgccggaaaagaaatcgagcaggcggcaacaaaagggcgcgctgtagcagtggtgaaaatttaccgcggccgtgccgttatcacgaatctcgtaaccgagtgacggctacccggccgaatgcctgccgcatgttttttcgcccataaaggaaatgccgggtgaaaaattcccctgtatccgcacccggtgcacgttccatcaagcgccattggcttggaaccgcagcgtgccgttttattttacaaaaaatggaaggccggaagcttattcaatatgcaaattttgcccggacagtgttttcacaaccgtgcaccgggccgcttttccttccgcagctttacttggaaagcaatggaacgaaagcctatgtgaaactctttcttgaaatttcgggtgaaaagggtcaaaatagcttatagtaaaacagtcatcaccgtatttttgagagaggggccgctttggacatggaacagcaaccatacatacatgatccggaagttgtggcacagattgaaaaagatttgcgttacatatccggcattgtcaagcaaaagggccgtgaattattaagcgattataaaattacgccgccgcagtttctggcgcttcaatggctttttgaagaaggcgacatgacgatcggggaactgtcgaaccggatgtatctggctttcagcacaacgacggacctgattgaccggatggaaaaaaatgaactcgtcaggcgcgtaaaagatccgcatgaccggcgggttgtccgcattcatttactggaaaaagggcgggtattaatcggcgaagtgatccggaaacggcaagcttacctgcagggtgtgctgagccatttttcaccggatgagctggtcaaattaaaaagcaacttgctgcagttgcatcaggaaatgaagacagaatgaggcgagaagtttgaatgcaccaataggcgtgattgattcgggggttggcggcctgaccgtggcaaaggaaatgatgcgccagcttccgaatgagaccatttattatgtgggcgacacagcacgatgcccgtacggaccgcggccggtggaagaagtcaaaaaattcacctggcagatgatccgttttctgatggacaaacaaattaaaatgctggtcatcgcctgcaatacggctacggcagtgattttggacgaagtcagggaagagctgaagattccggttctcggcgtcatttatcccggcgcgcgggccgctttaaaacatacaaaaaatttccggatcggcgtgctcggcacggtcggcacgattaaaagccaggcgtatgaacgggcgttaaaaagtatcaataaaaaagtcaggattacagcgcttgcctgcccgaaatttgtcccgcttgtggaaagcggccagtacaacagcccgattgccaaaaaaattgtcgccgaaaccttgtatccgatccaaaattgcggcattgacacagtcattctcgggtgtacccattatccgctcctcgggccgattatcaaaaacgtgatgggcgcgggcgtttcggtcatcagttccggggaggaaaccgcgcgcgaagtaagcacgcttctttacttccacgacctttttaatatggaagacacgcggcagaagcaccgcttttacaccaccggctcgagcaaaatatttgccgcgcttgcatcagactggcttgaacaggatattacttgtgtggaaaccattcaattgggggagacgctctcctgattggatggttttttgttttgccttagcccaagtccgcatagaaacggcaatggccgacatggttgcggattttgttaaacagatgtttttaaacattaatatttcgtgcatatcaagcgtttcatggacgcccagtgtctggtccaaatcaatctctcctgttcagctgtatttttattatggaaaagcgtgccgtttttattctgccccggaaatttttgcatgtccggtctaaatttgcggaaagccagtatacatagtagtacaaacagtcttcgggaggggaaagggatggcaaaaaagataaaggcagccggcaagtttgccctggcgcttgcggcatgcggcatctggatctcgggttgcagcctgctgcctgagaagcagccggaaaaaatcgatccgcatcaaagtgtttctgtaaaagatgggaccaaacaaaccgcaacagcaaagaaagggcaggtgctgacagaactgtatttgattgacaaaaatggttatgtcgttccgcaaacgatcgccttgcctgaaagcaaaagcattgcaaaacaggcactggaatacctcgtgcaggacggcccggtttccaatttgctgccgaacggcttccgcgcggtgcttcctgcgaatacgcagttgtcggtagatgtgaaagacggtttggcgacggtcgatttttcgggggattttaaagactatcaagcgcacgatgaacaaaaaatattggaatcggtcacatggacgctgacccagttcgactccattcaaaaagtctcgcttaaaatgaacggcaaaaaactgaaggcgatgccggttgcagggacaccggtaagcccgggcggtttgacaagggaagcaggcatcaatacagatacaaagtatgttgccgatattacaaatacccatccggtcaccgtttattatttggcggaaacaggcggacaaagctattatgtgccggtaacaaagcgtgttgcgaacagcagcaaggacgatgtggcagcagcggttgaagaactggtcaaaggtccttccccgggttcccatcttgtgtccggattcatggacgatgtcaaactgaagaaacagccggaaattgcaaacgggaaagtgacgcttgattttaataaagaaattttagggagcctcgataaaaagatgatctcaaacgaagtgctggagccgctcgtcctgacgctgacagagcaaaaagggattaaaagcgttgcagtcgaagtggacggcagtacaaaggttgttacggaagacggaaaatcggtttcagaaccggtgacaaggccggaaaaagtcaacacgggtagtttttagcatcgtttttttgttatactatagaatatgagacaaaaggggtagccagactacctcttatttgtatcgtgcatacatactacatttccggtaaagggggagaaaattggcggctgttttaattgcaacaaaaaacaaaggcaaagcaaaagaatttgcagctttattttcccggttcgggctcgaggttaaaacgcttttggatatggaaggcgcaccggacgtagaggaaacggggaaaacgtttgaagaaaatgcgattttaaaagcggaagcggcggccaatgcatacggcatgatggcgattgccgatgattcggggcttatgatcgatgcgcttggcggcaggccgggggttttttctgcacgctacgcagggaaagagaaaaatgatgaggcaaacatcgataaggtgctttccgagcttgaaggggtaccgaatgaaaaacgtacagcttctttctattgtgcacttgcggttgcgcgccccggaaaagaaacatttacggtttccggaacgcttcagggaaggatcacgcgggaaaggatcggagagaacggattcgggtacgatcccatttttatgctttcgtccggaaaaacgcttgcccagctttctgccgaagaaaaaaataaaatcagccaccgtgcccatgcactggcgaaactttcggatgcactgtattcgattttaggggaggaaggcaaaaaatgaaactgctgattgcaagtgacagccacggacttacggaagagctgctcgagcttaaacggcggtacgttggggaaatggacgcgatgatccattgcggcgattcggagttgcgtgcggacgaggaggccatccgggactttttaaccgtgcgcggcaattgcgattatgagcggaaatttccgcttgatatcacgaaagaaattggggacagcaaaatatttgtcacccacggccaccattataatgtaaaaatgaccctgttgaatttgtcttataaagcaaaagaagtgggggcggattttgtttttttcgggcactcccatattctcggtgccgagctgattgaaaatactcttttcctgaatcccggcagccttttgatgccaaggggcaggacggaacggacgtatgcgattgtggagaaaaacggaaatacgatccgtgtttcattttatacggacaagcaccgcgaacttgaggatttacgccaggaattctcgttatgacgccgggaactccggctgcagagcaaggcgggtacgaagccgggccaatccggttgcggaaaccgctgcctgctgctgcacccgcccgttgcaggaaaaaatcgtgtttttttcaaattcatgattgacatttgcccacctgctgattaaaatgaaatatgttcgtaacaaaccttataaggtttgttttcaagtgatttttgattgaaatggaaaatatttgacaacaaaccattttaaagtgtcccagtagctcagcaggatagagcatcggccttctaagccgcaggtcgggggttcgaatccctcctgnnnnnnnnnnnnnnnnnnnnnnnnnnnnnnnnnnnnnnnnnnnnnnnnnnnnnnnnnnnnnnnnnnnnnnnnnnnnnnnnnnnnnnnnnnnnnnnnnnnncgaatccctcctgggacgtagcgtataaccgcaaaaaggccgggcagtagggattttcccttgttgcccggccttttgtgtaaaatggcggaaagagcagttatgatttttgcccttctttttccagttctttcatttctttatgggtttgcggaaatccgtttgcgatccattcggaacggtatgtggagtccagctgtgtaagtcctttttcttccggcactttgtctgcatccacactttccatccggtcgatttttttgctgtttctcatatccgtgtcttcccaagtttcagccgaatctttttgccgtttgttgcaagcggccatggccagcacggctaccccggcggaaagcaaagtgcctgaaatcagattcatcgttgaccttttcatcgaatccctccgtcatgtgtagacttgttatagctttaccccttttttcttcttttaaatcatcacaatatgtttcaatcctttttcatttggacaaactataagtaaaactgcctgtttaagggaggaactggaatgcggaatgcaatggttttactggcaaaatttatcacgtgcatcgtcgcttttgcggttgcgcttgacttctttttctatgcgacgatcacagatattttatcgttcagcctgcttgtaacaattgtgtcttatgttgtcggggatgtgctccttttaccgcgcatcgggaactggaaagcaacagttgtcgactttttgcttgtttatgccagtgtctggattttcgggaacgtggtgcttgacaattatttgcaaattgcatggggcagcatcattgccgcctgcctgatttcggctgcggaagtattcgtgcacaggtttttgcaacatgatgccccaagcggcgaaaaaacggcaaaaaggcaaaaccagcgccttgcttacggcacggaaatggctgaggaagaggacattcacgatatcaggccggataagaaataagcaagccggacacggaagctttatggctttctgtgtttggcttttttcataatggaaagccccccggcagtataatccctttgcaaaaaaaccggttcatgctacactagtgacgatctaaaaaaaggcggaatggacaatgaaaaacggaaaaagcaatgtggtgccgttccctcgtctgaaagaacgcctcttggagcggggactcgaatccatcagccaaaaagaatataaagaagctgccgcgctgcttcgccaggcacgccggcttgaccatgacgatggggagatcgggaccgcctacatgattgcactctatgaagccggcgattatgaaagagcgaaagaacagggcaggcaaatgcttcgtgaaggaaccggcgattacttcgaaattctcgatctgtttctcatgattcttgtgcagctcggtgaacatgaagaaatcagcagcaccctgcatgccctgctggaagaaaaagaagccccgccggacaagctggaccattatgaaaaactgctcgctttcagtgaaaagcggatgcagatgccaaaaccggaacaggagcccgggcagacaggccgcaaactttttgaaaccgagaaccaggaagaacaaatcttgcgggtttcgcatctggtgcatgaaaatatacgcccgtatctcgatgaaatccgggcgtatatccgggatccggacgaacatccgtttatccagacccttttgctgaatgttttaaaagaacaggggatcacggatgaattcgaagtgcaaaaactcggcaaggctggcgccgtaaatcccgcgcatcttttgccgatttttgaaacgcagctgtacaatcttttgattacgcggctttcaagggatgtcgaacaaaaaaatccgaccctttttgcccaagttaaaacggttttggatcggcactttttcctgctgtatccgtttgaaccggagccggaagatccctcgctgtgggcggctgcctattacagcatgggcctgaagcttttcgggcaggaagcgtatttggataaaatcgcgatgtactattcggtggagccggatgcgctgcttgaggccgtccgctatctcgaaagccttgaggaaatttctttgccgaatctgtaggctcatcattgaaagacaaaaaagctgtgttataattaaatggttgtaaactgtcttttttcaatccgtatttgaaaaaagcaatagacaagggaatcaggaaacagacccggtctatttcctattattacattattatttatagattgttggagggaaaggtatgtcagcaaaatgggaaaaaactgaaggaaaccaggggatcctgacagttgaagtagatgctgaaacggttgataaaagtctggataaagccttcaaaaaagtagtaaaacaaatcaatgtcccgggtttccggaaggggaaaatcccgcgtcctttatttgaaaaacgtttcggtgtggaatctctttaccaggatgcactggatatgatcgtgcctggcgaatacgaaaaagcgatcgaagaaaccggcattgaaccggtcgatacgccgaatattgatgtcgaacaaatggaaaaaggcaaaccgttaatctttaaagcgactgttaccgtgaaaccggaagtaaaacttggcgaatacaaaggccttgaagtcgaaaaaccggatacagaagtaacggacgaagacgtggaagaagaattgaagaaactgcaggaacgccttgccgaactcgtgatcaaggaagacggcgaagcggaaatgggcgacacggttgtcatcgacttcgaaggattcgttgacggcgaagcgttcgaaggcggatctgcggaaaactattcgcttgaacttgggtcgggcaacttcatcccgggttttgaagaacaattagtaggcgtaaaaaccggcgatgaaaaagaaatcgaagtcactttcccggaagaataccatgctagtgaacttgcaggcaaaaaagctgttttcaaggtaaaagtccatgaaatcaaagcgaaacacctgcctgaactggatgatgaattcgcgcaggatgcggatgacgaagtggaaacgctggatgcattaaaagaaaaaatcaaaaaagacttaaaagaatcgaaagaacatgcggcaaaacacgcggttgaagatgcagtggtcgaaaaagcagcggaaaatgcggaaatggacattccggaagcgatgatcaatacggaattgaaccgcatgctgcaagaattcgaacaaaacctgagtgcccaggggctgaaccttgaactttactatcagttctccggccagaatgaagaagcgctccgcaatcagatgaaagaagatgcggaaaaacgcgtccgctttaatctgacgcttgaagcgattgccaatgcggaaaagcttgaagtatccgatgaagaagtggatgaagaactgaaacgcatgtccgaaatgtacggcatgcccgttgaagatatcaggcgggtgctcggttctacggatggcatcaaagccgatctgaaagcgcgcaaagcgatcgattttcttgtgcaaaacagcaaaactgttgcataatataaatagaaatacaaggcacggcactggctcgtgtcttgttttctaacctgcgggctgtgccaaaaaaaaaatacatagaagcctatactgtaagagaagcgcaccagaaacttagcggtgcaatttttcaggatggagaagaatatttgtctggtttttgggaaaatctggagtagacaggaattttacatatgcatggagaatgatataagcagtttatttcctgccaccatagttttgtgatacaatccatatacaaatcacagcaaaaggggtttgtataatggtaagcgggagtcatgaagggtccctgttatttcaggaactgccaatggagtggaagaagtacaatataaggggtgaatggaatgttcaaattcagcgatgaaaaacagcagttaaaatgttctttctgcggaaaatcgcaggaccaggtgcgaaaattggtcgctggtccgggtgtgtatatatgtgatgaatgcattgaattgtgcacggaaattgttgaagaggaatttggcacggaagaagaagtggaattcaaagacattccgaaaccgcatgaaatccgtgaaattcttgcggaatatgtaatcggccaggaacaggcgaaaaaatcgcttgcggttgccgtatataaccattataaacggattaattccaacagcaaaattgatgaagtagagctggcaaaaagcaatatttgcttaatcgggccgacggggagcgggaaaacgttgcttgcgcaaacgctggcacgcattttgaatgtgccgtttgcgattgccgatgccacatcgctgacggaagccggctatgttggagaagacgtcgaaaatattttgttaaagctgatccaggcggctgattatgatgtggaaaaagcggaaaaaggcatcatctatattgatgagattgataaaattgcccgtaaatcggaaaacccttcgattacgcgcgatgtttccggtgaaggcgtgcagcaggcgctcctgaaaattttggaaggcacggttgcgagcgttccgcctcaaggagggcgcaaacatccgcaccaggaatttatccagattgacacaaccaatattctgtttatttgcggcggtgcgtttgacggcatcgaccagatcattaaacgccgcctcggcaaaaaagtgatcggtttcggcaccgatttaaaaaatgacgaactcgatgaaaaatcgctcctgaagcaggtactgccggaagatttgctttctttcgggctgattccggaattcatcggccgccttccggtcattgccactttggaacaattggacgaagaggcattgattaaaattttgaccgaaccgaaaaatgcgctggtcaagcagtataaaaaaatgttggaactcgaccatgtagaattggaattcgaacaggatgcgctgaaggaaatcgcgaaaaaagcgatcgaaagaaaaacgggtgcacgcggcctgcgttccattattgaaggcattatgctcgatgtgatgttcgacttgccgtcccgggaagatattaaaaaatgtattgtcacaaaagaatccgtcctggacaaagaattcccgcgacttgtgctgaaagacggcacagtcattgaaggcagcgaccagacaaaatcggcataaataaaacggagccgggctgcccgccggcaatccggcgtgaacattctttttgagcaggaaccggcctccggcagcaggggcaaatattctcggtattggcacagcgccggcaaaatgaaaagcgaagcagaataaagaagcaaagggcgagcggtgcgcttgcccttttttcttccacttacccgttcccggttttcagaaatccccgtttattccctccggcagccggagatactaggtaaataaggaagcggcatgatcaggctgcaactgaaatgcttggagggaataggatgaattggacggggattgccttattgatccagttatttttcggggtcataatcgggctttacttttggaacttgttaaaaagccaaaaaacacaaaaaatgacgatagacagggaatcgaaaaaagaaatggaacagttgcggaaactgcgggaaatttctttatctgtgccgctttcggaacgcgtccgcccggtagcgttcgcggatattgtgggccaggaagacggcattaaagcgctgcgggcggcgctttgcggcccgaacccgcaacactgtatcatttacgggccgcccggtgtcggcaaaacggcagcggcccggcttgtgcttgaggaagccaaaaaaaatccgaaatccccttttcaacacgacgctgtttttgttgaactggatgccacaacagcccgctttgatgagaggggcattgccgatcctttaatcggttccgttcacgacccgatctaccagggggcgggcgccatgggtcaggccggcatcccgcagccgaagcagggtgcggtcacctctgcccacggcggcgtcctgtttattgatgaaatcggggaattgcacccggttcaaatgaataaattattgaaagtactggaagacaggaaagtttttttggaaagtgcgtattacaatcctgaaaaccgggaaattccgcatcatatccatgatattttccaaaacgggctgcctgcggatttccggctgatcggcgcaacgaccagaacgccgaacgaaattccgccggccatccgttcgcgctgcatggaagtgttttttcgcgaacttgaccgcagcgaaattaaacaggttgcaaaaaaggcagctgataaaatccatatggcaatcagcgaaaacggcctggacattttggcgcaatatacccaaaacggcagggaagcggtcaatatggtgcaaattgctgcaggacttgcgatccaggaaggacaggattttatccgggagcaggacctggaatgggtggcaacagccagccagttgtcgccgcgctatgagaaaagggcccctgaacagccggcggccggccttgtcaacgggcttgccgtaaccgggccgaacacagggatacttcttgaaattgaagtggcggccattccggcaaaagaaaagggcagcgtcaacattaccgggattgtggacgaagagagcatcggcggcgaagggaaatcggtccgcagaaaaagcatggcgagaggttccgccgaaaacgtcattaccgttttacggacgatgggtgtgcccgctgaccagtatgacctccatgtcaattttccgggcgggattccggttgacggcccttccgccgggattgcgatggcatgcggcatttattccgccatttataaaattcctgttgaccagacagcagccatgacaggggaaatcagcctgcacggcaaggtcaaaccggtcggcggcgtgtatgccaaaataaaagcagcaaaacaggcaggcgccaaaacggtgatcattcctgccgaaaacatgcaggcctcattcaaggaaatcaccggcattgcgatcgttccggtccggcagcttgaagaagtcctggatatcgcattaaagaaacattttaacgacaatgcgctcatagggggttaatggacaggccccctaaagacgtatcaagataggggtgctgagatgacaacacaatccgcatacacagttcctttgcttcctttacgggggattcttgtgtatccatcgatggttttgcacttggacgtcggccgggactactctgtacaggcccttgaaaacgccatgatgcatggcagcgaagttttcatgacgacacaaaaagacgtttccatcgaagaaccaaaacaggaagatttataccaaaccggaacgctcacaaaagtgaaccagatgatgaaactgcagaacgggaccatccgcgtgctcgtggaaggcgtgcggcgcgcaaaaattgtatcttttgaagatgaaggcaccttctattccgtcgaagtcgaaacatttgatgagcggtttctgccggatgcagaaacggaagcgttgatgcgcacgatgctcgaatttttcaatcagtacatcagccagtcgaaaaaaatttcgggtgaaaccttccaggcggtctccgatatggaagacgggggcaaggcggccgatattatcgcatcccatttgccgctccgccttccgcaaaagcaggacattctcgaaacgattgacataaaagaaagaattcgaaagctgatcgggctgatcaaaaatgaacaggaaattttgcagcttgaaaaagaaatcagccagcaagtgaaaaagtcgatggagcggacgcaaaaagaatattatttgcgggaacaaatgaaagccatccagaaagaactcggggataaagaaggcaaaacggcggaagtgcatgagctgcgcgaaaaaattctgaatgccggcatgcccgagcatgtggccaataccgcgttcaaagaattggaccggtatgaaaaaattccggccgcttcgtctgaaagcgcggtgatccgcaattatttggactggctgatcacgctcccgtggtcgaacgctacagaagatgacctcaacgtcgcaaaagcggaaaagattttgaacgaagaccactacggccttgaaaaagtgaaggagcgcgtccttgaatacctggcggtgcagcagctgacccggtcgatcaaggggccgatcctttgccttgccgggcctccgggtgtcgggaaaacgagcctggcacggtcaattgcaaaatctttgggcagaaaatttgtccgcgtttcgctcggcggcgtgagggacgaatcggaaatccgcggccaccgcagaacatatgtcggcgcaatgccggggcggatcatccagggcatgaaaaaagccggcacgataaatccggtttttttgctcgatgaaatcgataaaatggccagcgactttcgcggcgacccctcagcagcgatgcttgaggtgcttgatccggaacagaaccatgcgttcagcgaccattttattgaagagccgtatgatttgtcgaaagtgatgttcattgcaacggccaacgatctgtctgcagttcccggccctttgcgcgaccggatggaaatcatttcgatctccggctatacggaattggaaaaaattgaaattgccaagtcccatctgctccctaagcaaataaaagaaaacgggcttgcccgcaatcagctgagggtggatgcggaggctctccgcctggtcgtgcgccgctatacgcgcgaagcaggcgtgcgcggactggaacggagattggccgaagtttgcaggaaaacggcgaaagtcattgtatccgggaaaagaaaacgggtcacggtctcagcaaaaaatatcgttgactttctgggaaagccgctttaccattacgggcaggccgaaatggaagaccaggttggcgtggcgaccgggcttgcctacacgaccgtcggcggcgatacacttcagatcgaagtgtcgctttcaccggggaaaggaaagctggtcctgaccggaaaacttggggatgtgatgaaagagtccgcccagaccgccttcagttttgtccgctccaaagcggaaacactcgggcttgcgccggatttccatgaaaagtatgatattcatatccacgttccggaaggcgctgtgccgaaggacggcccttctgccgggatcacgattgcaaccgccctgatttccgcactgacgaagcatgccgtgcataaggaagtcgggatgacaggcgaaatcaccctgcgcggcagagtactcccgatcggcggattgaaggaaaaatcgctcggcgcacatagagcggggctgaaaaaaattattattccgaaagaaaatgagagagatttggatgacattccggaaagcgtgcgcggggatctccatttttacccggtcacgcatatggatgaagtcattgaaattgccattgcaggtgaggagaaatgaaagtaacggaggcagaactggtcatcagcgcggtgcggcaggagcaatatccggaagggcatttgccggaaattgcgcttgccggccggtcaaatgtgggaaagtcttcctttattaataaaatgatcaaccgcaaagcccttgcccggacctcttccaagccggggaaaacccagacgctgaacttttacaaaatcgaaaacaaattgtactttgtcgacgttcccggctacgggtttgcgaaggtgtcgaaaaaagaacgggaaaaatggggccagatgattgaggcgtacatgacatcaagaaaacagctgaagacggtcgtgctcattgtggatgtccggcatccgccgacaaacgacgactgcctgatgtacaattttttaaagtactacaaaatcccgtgtatcatcgtggccacaaaagccgataaaatcccgaaaggcaaatgggcatcccatttgaaaacggcaaaagaaacgctgaatctggaaaaagaagacgaaatcattttattttcatctgaaacaggagaggggaaggacaaagtgtgggcttccctgatggaaagaatcaagtgaataaaagcccggggccagcatgtgggcgccgggcttttctgcaggcttcgggaccgcatccgaaatagtatttattcagccgggcttgtagcggcccgtccccggaatttgccggtgggaatcgcctggccgttttttcgggcgcacgggctgtttgaatgcccggcttttacgggcgggttatttccgcccccttcttttcgcaaacagcaggtagacgccgataacgacaagcacggccggccagaaattgatcagggaagaaacattgttctcgacaaggccgaaccaccccatcactttatcggaaaacaggagcaggatggacagcacgagaaacagcaggccgtaaaacgtgccatccccagttttttgcgaacggagcaaaaaaccgatggcaatgatgagaacaaagaccccgatattgtccggccaaattgcgattttgccggcaaggtggaagtggaggccgaacccgacgagaatgacccccggcaaaatcgattcctcgtcccggccccagtagccttcgcctaaaaaagcgagcccgacaatgatcaacagcgtcggccatgtaaagtaatccttcatgccggtaaggtcaaaacgctgcaaataaaaatacaggccgaacccgatcaggataatggcggaaaaaattttgcggcttttcaatgggacacacttctttccttcaatctagttgcttgaaaccatcgcctgtttctgctattttacaggtaggaatggttattatgccaaatgggaaaaacgatcttttttcttctattcatcttaacatagatcaacattcaatcctatgcatttggcaagataaaatgggggtgccggagggcaacaatgagaatacttactgtcggtttaaactataaatctgcgccggttgaaatccgcgaacagctgtcatttgatgaggcggacctcgcggatgcgatggcggcgctgcaaaagaaaaagagcattttggaaaatgtcatcgtgtctacatgcaaccgtacggaaatttatgcggtcgccgaccaggcgcataccgggcgttattatattaaagattttttgtcggaatggttcgggatagataaggaagcatttgccccctatctgcttatttacgaagacaacgaagccattgcgcatttgtttaaagtgatttgcgggcttgactcgatggtgcttggcgaaacgcaaattctcgggcaggtgagagacagttttctgctggcccaagcatccggttcaaccggcaccatttttaaccgcctgttcaaagatgcggttacactggcaaaaaaagcccatacagaaacggaaattgcttccaatgccgtttcggtcagttatgcggctgtggagcttgcgaagaaaattttcggcggcatggctgataaaaaagtggccatcatcggcgccggcaagatgggcgaactggctgtggaaaacattcacggcagcggcgccacccggattaccgtcatcaaccggacgccggaaaaagccgggcgccttgccgcacgcttccatggcgaggcactcgggctgtcatctttggaaaccgcgcttttggatgcggatatcgcgatcacctccacttcggcaaaagagtacgtccttacagcagatatgctgaaacccattgaaaagaaacggaacgggcgcccgctgctgcttgtggatattgccgtgccgcgcaatattgatccggaagccgcgtcccttgaatccgttttcctgtatgatattgacgacctggaaggcatcgtggaagccaatctgaaagaacgggaaaaagccgcccggcagattgcggacatgatttccgatgccgtttgcgcattcaatgaatgggtccatacactcggagtggtgccggtgatcacggcgctccgggaaaaagcgctcgcgatccaggcggaaacgatgaaaagcattgaacggaagctgccggacttaacagaacgcgaacggaaagtcatcagcaaacatacaaaaagcatcatcaaccagatgctgaaagatccgattctgcaggcaaaagaaatggcgggttcgccggatgcagcccggaatctggaactgttccgccaaattttcaatttagaaacagagacggggcaagcggagccggcagccgaaatggcgcggcatgcagtccgcccgtcctattcgggttaaccggagagcccggcaatgtatgccgtatggacggacaggctgcatgaaggcatgattttgctttatgccgccagtattttgctttattttcttgactttctccaccggaaccggaaggccaacaaggctgccttccgttttctttccgttgtctgggcattgcagacggtgatatttatcttgtatatggcccacaccagacggttccctgtcttgacattgtctgaggggctttatttttatgcatgggcattgctgacgctgtctctggccctgaaccgcctgctgcgcgttgactttaccgtgttttttacaaacgtcatcggctttttcatcatgacggtccacgcttttgcgccggggaaggtctcacaaggagcagggagaagggtatcggaacttttgctcatgcatattacgatgacgctgatcgcttacgtgctgttttccctgtcctttgtcttttccattctgtatttattacaatataagtggctgaaggaaaagaaatggagccacagaatctggcgcctgaatgatctggcaaaactggagcggctttcgaaatggatgaatgccattgcggtcccggtccttttgctcgggctgattctcgggttggaatgggcatacttgcggcttccggccattcactggttcgatccgaaaattgtcggttcgtttgccgtgctgcttgtatacagttttctcctgtatgccggcgaacgccgccgcatgttcggaaaaacactggcttactggaatacggccgcttttttgatcattttgattaacttttttctaattacgggattatcggattttcatttgtattattaggagggttgccggatgagaacaattgtcgtagggtcgaggcggagcaaacttgccctgacgcagacaaagtgggtggtggcgaagcttgaacagctcgggctgccttttcgttttgaaatcagggaaatcatcacaaagggcgataaagtgctcgatgtcaccctgtccaaagtcggcgggaaaggcctgtttgtcaaagaaattgaagatgccatgctgcatcatgaaattgacatggctgtacatagcatgaaagatgtgccggctgtgcttccggacgggcttgtgatcggctgcattccggagcgcgaagatgtgcgggacgcattgatttccaaaaatggcacacctttttccgaccttaaggaaggggcggttgtcgggacaagcagcctccgccgcggcgcccagctgcttgccgtaaggagcgatatccggattaagtctgttcgcggcaatattgatacaaggctggaaaaattaaaaaacggggattacgatgcgatcgtcctcgcggcagccggtttaaaacggatgggctggagtgcggacaccgtcaccgaattttttgacccggatatttgcctgcctgcaatcggacagggcgcgctggctgtcgaatgtcgcgctgatgacggggaactgctcgatgcgctccgggagctgaacagcgcagaaacggcggaaacagtaagggcggagcgcgtcttccttgataaaatggaaggcggttgccaggtaccgattgccggccttgcgaagaaaacggcagaaggcatttccctcacggcccttgtcgcctcccctgatggcaaaacggtttacaaagaaacggttgtctcccgcaacccggtaacagccggagaaaaggcggcagatattttaagccggcagggggcaaaggcgctgattgaacaagtgaaagcggagctcgggcagtcatgacggcaaacgggcctttaagcggaaaaaacattctggtcacaagaggcggaaaagacggcgaaaagctcgcagcacaaattgaagcgctcggcggcaccccttttgtcgtcccgatggttgccttccgtgcatatgccgacccgtccgcacctgtatttttgcgaaaactgccggcatacgactgggttgtgtttacaagcaaaaacggggtccgttattttttggaagcatgcagccgtgcgggtatagcatgtgagcatttgaacataaactgggcagccgtggggaaaaagacggctgcctgtatggaacagtccggtttaaaggtttcctttgcgcccgggaagtttacggcaaaagattttgcccgggaatttatgcggagcgggcaccgtgcaggacgcgtccttctcccgaaaggaaacctggccgggacagaaattgcggattttctaagaaaaagcggtataatagcagaggaatggattatctatgaagcgtatatgccagaaggggcaaaagaaaagcttgcccgcttgctcgggcgggaaacaatcgattttgccctgtttttaagcccgtccgccttccgctattttaaaggcgcgcttgaggaaaacggcatagatatcgcggggctttcaacccggatcgcagtaatcggcccttcaaccaggcaggcagtggaaaaagccggaagccgtgcagcggtttgcccggatgaatacaccgtcggggccatgcttggggcattatgcgattttgtccgtttagaagaaaaatagcaagaaaccggcacgaacccgggattgaagcggccggcctgacagacggttgccgtgcatggtttgcccgggggacagccgggcgacgcttgaccgcaaagaaaaaatagaaaaagcgggatttgcccgccgccgcaatcatcgccaacaagccggcccgtcgtgcatatgcaatgcattgcggcattctaccagtttaggaggaaataaaatgaaagatttgcagtttgcccgccaccgcaggctccgccaaagcgccaatatgcgggctttggtgcgcgaaacgaatgtaacagtgaacgacttgatttatccgatttttgctgttgaaggcgaaaatgttaaaaatgaaattgcttcgatgccgggtgtgtaccactggtcgctggaccgcctccatgaaatcatggatgaagttgtttccctcggcatcaaatccgtcattttattcggcgtaccgaaccataaggatgcaaccggaacggaagcgtaccacgaccacggcatcgtccaggaagccatccgtttcatcaaaaaaaattacccggatatcattgtcatcgctgatacctgcctgtgcgaatataccgatcacggccattgcggcgttgtggaagacgggaaaattttaaacgacccgagccttgacctgcttgcgaaaacggcggtcagccaggcaaaagcaggcgctgatatcattgcgccttcgaatatgatggacggatttgtcacagcgattcgcaaagggcttgatgaagcaggctttgaagatgtgccgatcatgagttatgcggtcaaatacgcatccgctttttacggcccgttccgcgaagccgctgacagcacccccgctttcggggaccggaaaacctaccagatggatccggccaaccggctcgaagcattgcgtgaagcgcagtcggatgtggaagaaggggcggattttctgatcgtaaaaccgacgctttcttatcttgatatcgtccgtgatgtgcggaatgaattccgcctcccggttgtcgggtataatgtgagcggagagtattctatggtaaaaggcgctgcacaaaacggctggattgatgaaaaagcgattgttcttgaaatgatcacaagcatgaaacgcgccggctgcgatctcatcattacctatttttcactcgatattgcccgctggcttgcggaataaacgggaggttgaaagatgcgctcatatgaaaactcaatcgaagcatacaaagaagcggtcacattaatgccgggaggggtgaacagccctgtccgtgcctttaaagcggtcggcatgaacccgatttttatggaccacggcaaaggcgcaaaaatttatgatattgacggaaatgaatatattgattacgtgctgtcatgggggccgctcatccttggccatgccaatcccaaagtcgtggatgccctgaaaaaaacggctgaaaaagggacgagtttcggcacgccgacgatcatggaaaataaactggcgtcactcgtgaaagaacgcgtgccgtcgattgaaattgtccgcatggtctcatccggtacggaagccacgatgagtgctttgcgcctggcaagaggttatacaggccggaataaaattttaaaattcgaaggcagctaccatggacatggcgattcgctcctgatcaaagcagggtcgggcgttgctacactgggtttgccggacagccccggcgtgccgctcgggatcgcgcaaaacacgattgccgtcccgtacaatgatctggaagccgtccgttcggcattcgagcagtacggggaagatattgcctgcatcatcgtcgaaccggttgccggcaatatgggcgttgttccgccgaagcccggctttttgcaagggttgcgtgatgtcacatcagcatacggcgccctcctgatctttgatgaagtgatgaccggtttccgtgtcgactatcactgtgcacaaggctattttgatgtaacgcctgatttgacctgcctcggcaaagtaatcggcggcggccttcctgtcggcgcatttggcggacgggccgacattatggaaaaaattgcaccgaccgggcctgtttaccaggcagggactttgtccggcaacccgcttgcgatgacggcgggatatgaaacattgcggcagttaacacctgaaacgtatgcagcgttcaggcgaaaagcagaccgcctcgaacagggctttcatgaggcagcggtgaaatacgacatcccgcataccattaaccgggcgggatcgatgattggcatctttttcaccaatgaagaagtcaataattttgcatcagcaagaacttcggatttggatctgtttgcccgctactaccgtggcatggcagaaaacggcattttcctcccgccgtcccaattcgaaggcatcttcctgtctgccgcgcatacggatgacgatattgaccgtaccgtcgaagcagcagaaaaaacatttaaggcaatccgcgggtaaatcctgcggctatgaaccggcaagtccgaaaacggatgagccggttttttgcgttttgtccgctgcgggtgagagaaacggcaataagggaaagcatgctgggtgccctgcggtttttgaatgggtaactttgaaaacggatggccagtttttaccgatctttcaccgcatccaatattgtagcagaaaagccattcaagtgatttgcggatgctgcggttttttttgcgatcataaaaaccccgattgcttcatacagtgtaaatgacatattcattgggatttggaggaattgaagggaggaacccgctttgccgcaaaatcaatcgtccatacgattttcattagaagaattgatttggtttaaaaaaggacaggaagttgaagaacttttatcgatatcattggatccccatatcaccatacaggaattggagcagtatgtcgtgatcaaaggcaatctctatttatccggggagtacattggttgcggggaagaagaaggggaagatgtgctgttcaggaagtatgtgcagtcggtccagtaccgggaagaagacggcatatttgaattttaccaatctttcccggtagacgttaccattccaaagacaagaattgcggatattgaggagctggacgtcaatatagaaggttttgactatcagtttcacggaaccgattgtttaaaaatcaatgcggatattgcgattgagggaatattgcaagacggggatgaggaagaagacgaagcagaaacagcgccatacccggatttaaacggcagggaaacatatttggatgagccggacgcagcatatcaggcgcctttcagccattccgaatggggcttggcggaacaagaagaagagagcgccgaactgccccgccattttatggaagaagcggaaagctttgaagaagtgccttttcgtgcagatgaggaaaaggcagaagaggatgaatctcacgctgacccggaattgtatacgccttttacaatcgaatcgcgtgtggtgccggaagaatcggttgctcagccggaaccgttcacaaacgaactgaatgtattggaaccggtcgaacttccagaagaggaggaggagagcctcttgccggaaacagacggaaaaaggccggaaagtgcttcatggcaggcagaaacagccgcgccggtacgggatgaatggcatggggatccggcgttttccagtaataatgagtctgcctcgttggcggaaagcggagtggtgcaggacgaatggcaggcagatcttgagttacctggtaaaaatgaatcggcatcgttggcggaaagcggagtggcgcgggatgagtggcacgctgagccggggttttccggaaaaaacgaatcggcatcgttggcggaaagtgaaccagtgcagaatgaatggcatttcgaagcggactttcctggtaaaaacgagtcggcatcgttggcggaaagtgaaccggcgcaggacgaatggcaggccggcccggagttacctgataaaaatgagtctgcatcgttggcggaaagcggagtggcgcgggatgaatggcatgcggaaccggagttttccagcaaaaacgaaccggcatcaatagcagaaagcgaatcagtgcgaaatgaatggcaggcagatccggtacgggacgaatggcatcctgatcaggaattgtccggagaaaccgcatccgtgtcccggacggagagcaaaacggcgctgaatgaagaatctcttgagccggacgattccaggaagactgaacctgttttccggattgagagcaaagcaatggaagatgaatcttctgcttatatcgagcaagaatcacctgaaaaatacgaatcctcttctgaagccggcggcgaaacgatggtggaagagtcgcctgaaagcgaaggaaaaacagaggaagagccggaagaaaaggattcggctgccaagaagaaaaagaagcaaaaatacgaatccatttcacttgccgacttttttgcccggagagatgaagaaaagcctgccaagttaaaggtttgcatcgtccaaagcggggagacgctcgaccagcttgctgaaaaatacaatatcaatgtccagcagattttaaggatgaaccatttggaagtgaatcaggatttgtatgaggggcaagtgctgtacgttcccgccaacgcgcgcgccgaaaaaaatcactgagcccgggcattcacaggcacgggcgtccaggtgaaggatgtaccggcattcagagcctgcgttaacatagaattgaccgcgtaaaggaagcgtgcaaaatatgcgtcttccttactcagagtgtgtttccgtgaaggaagcgtgcaaaagcggggccttccctaacccggcgtgcgcctgtgtgaaggaagcaggcaaaacttagtgtcttccttagcctaaagcggtctatgttcaggcatcaagcaaaatgaaagtcttccgaacccggaaggcgcctgcgtccaagctgcggcgaatgcggcgccagcggggaatgaaaatgagcaagcgcctatttttgaggagtaacgctctaagaaggtgaaacgggtggctgacctttcgcagcaggacatcaatcggattgtgaagcattacggcctgaacactgaatatgtcgggcggtacggaaaagtgtataaaatttataccggccagggtatttttgctttaaaaaaaattgcaccgcaaaacgggatgggatttatccggcatgtccagtccctgtaccagcgggggtataaccgtattgtcccggtctatcccacgttggacggccgttacggggtgctgtataacggggcattgtactatttaatgccctggctgccaaacgaagaaaaagaagcacgcggcgagaaacatcaaaaaatgttcagggaactcgcgcgcctgcacagcttgtccgtcaaagatacggaggtctcaatagaaaaacggcgggaatactatgaagaaaccctttcccgctggtacgggcagcaggattttttagaagagttccttgaacggtgtgaagagcaggtctatatgtccccgtttgccctgttgtactgcaccttttacaatgaaacgaaccaggcgctcaaattctcgatccagcagctggaaaactggtatgaacaatcgaaagagatggagaaagcgagaacggtgaccatccacggaaaaatttcaacggagcatttcctgtacgatgaacgcgggctcggatacttcaccaatttcgaactggcaaaaaccgctgcgcctttttatgacctgcttcccttcttgtcgcgggcgctcgactcctatccgagccggtttgacgactgcgtggactgggtgaagacctacttcagctattttccgcttaaggaagatgaaagaagcttatttttcagctatctcgcttatcccgcatcgatcatccaaaccgtggaggaatactttgcaaatgaagggaaacgccatgaagcgagagcagtcgcgaaactgcaggaaaagtactggcggatgaaaaataccgagtatgtcgttatgcagttgtcacaagggaccgcccccgcgtcatgaaaagcagggacggccattaaaaccattcatactggaacccgagataaatgagaataaatatggcaagcagcaggacgtcaaacgtggtcggaaaaataatcgtgcggatggcctgaaagacggagaacggaagaatcagctgcttgcacactttttttgcattccgcccccaagtacggacggcctgtttgtcaatttttttcttcatcatcatccacccatccctcatagataatgtatgaaaagcgggcggataagtgaatccgttgcatattttttctaaaaatgggcaatgctattgacgattttcaaaaaaaccgataccataaactatagccaatttcaaaaatcaaaatacaatgaacgggaagagtacagattttgtttccatgcagagaggggaatcagctgctgaaagatttcctatgcgaaacaggctggaaggtcgcccgggagtagcttttgtgaacccgaaaatagcaaaagccggcgaagtgccgttaatgacccgagagtgccgggcatccgtttgcccgtgaaaaaaggtggtaccgcgaacagactcctttcgtccttttatggcgaagggagtttttgtgtttatccgcaaaaaacgcagaaaggaatgatacaaatggaacagcaggacatcagcatgccgaccaaatatgatccgcaggctgttgaaaaagggcgctatgaatggtgggtgaacggcaaatttttcgaagcaaaaggcgatccagaaaagaagccgtacacgattgtgattccaccgccgaacgtaaccggcaagctccatctcggccatgcctgggatacggctttgcaggatattttaacccggatgaaacggatgcagggctatgatgtgctctggctgccggggatggaccacgccgggattgcaacgcaggcaaaagtggaagccaaactgcgtgaagaaggcaaatcccgctatgacctcggccgcgagaagtttacggaagaagcatggaagtggaaagcggaatacgctcactttatccgcaaacaatgggcgaaactcggcctcgggctcgattattcgcgcgaacgttttacgctcgatgaagggctgtcaaaagctgtaaaagaagtatttgtttcgctttataaaaaaggcttgatttaccgcggcgagtacatcatcaactgggacccggaaacgaaaacggcgctttccgatattgaagtagtctacaaagaggtgcagggcgcattttaccatctggcatacccgttaagcgacggttccggcacgattgaaatcgcgacaacgcgcccggaaacgatgctgggtgatacggcggtcgctgtccacccggatgatgaacgctacaaacatttaatcgggaaaacgattgtattgccaatcgtcggccgcgaaattccgattatcgcagacgagtatgttgatatggcatttggttccggtgccgtaaaaattacaccggcccatgacccgaacgacttcgaagtcgggaaccgccacaatctcgaacgcatccttgtgatgaacgaggacggcacaatgaatgaaaatgccggaaaatacaaaggcatggaccggtttgaatgccgcaaacagatcgtgaaggacttgaaagcactcggcgttcttgtcaaagtggaagaccatctccattcggtcggccattccgaacggagcggcgcggttgtcgaaccgtatttgtccacgcaatggtttgtgaaaatgcagccgctcgctgatgccgcggtaaaactgcaggcgtcggaaggaaaagtccattttgtgccggaacgctttgaaaaaacctacttgcactggatggaaaatatccgcgattggtgcatttcgcgccagctctggtggggccaccggattccggcctggtaccataaagaaaccggcgaagtatatgttgacaccgagccgccccgtgacatcgaaaactgggaacaggatccggacgtgctcgatacgtggttcagctcggcgctctggccgttttcgacaatgggctggcctgatgaagaagcggaagactacaagcgttattatccgaccgatacgcttgtgactggctatgatatcattttcttctgggtatcgcggatgattttccaggggcttgagtttaccggcaaacgcccgttcaaagatgtcctgatccatggccttgtccgcgacgagcaggggcggaaaatgagcaaatcgctcggcaacggcgtcgacccgatggaagtaatcgacaaatacggcgcggactcgctccgctatttccttaccaccggcagcgcgcccggccaggatttgcgtttcagttacgaaaaagtcgaagcggtctggaatttcgccaataaaatttggaacgcctcccgttttgcgcttatgaacatgaacgggctgaaatacgaagaaattgacctttccggtgaaaaatcagtcgctgacaaatggattttaacgcgtttgaacgaaacgatcgaaaccgttacaaaactggcggacaaatacgaattcggcgaagccgggcgcatgctttacaattttatctgggacgatttctgcgactggtacattgaaatggcaaaactgccgctttacagcgaagatgaagcagcgaagaaaacggcgcgctcggtcctcgcgtatgtgctcgacaatacgatgcggcttttgcacccgttcatgccgtttattaccgaggaaatttggcaaaacctgccgcatcagggggaatcgatcacaacagccgcgtggccggaagcggacgaaagccttacggatgccgcggccagcgaagaaatgaaactgcttgtcgacatcatccgttctgtccgcaatatccgcgccgaagtgaacacgccgttaagcaaaaaaatcaaactgcatttgaaagcgaaagacgagacggtcttagcggctttaaaacgaaacgaagcgtacattacccgtttctgcaacccggatgaattgaaaatggggcttgaccttgaggcgccggacaaagccatgactgcggtcgtttctggtgtggaactgttcctgccgcttgaagggctgatcaattttgaagaagaactggcccggctcaggaaagagttggaaaaatggaataaagaagttgaacgcgtccagaaaaaactgtccaatgaagggttcctgaaaaaagcgccggaaaaagtcgttgccgaagaacgggcaaaagaaaaagactatctcgaaaaacgaagcgccgtcgaaacgcgcatcagagaacttgaaaaccagtaacacaagggcggaaggcgaattctttacggattcgtcttcctttcatacgggaggaaaggcaaatgtttgaaacctatgaagaagcggtcggctggatccggtcccgctcgaaattcgggatgaaaccggggcttgaacggatgcagtggctgatggaaaaattgcaccacccggaacaaaaaatccggacggtccacgtggccgggacgaacggaaaagggtcgaccgtcacctttttgcgcaatattttagagcaggcaggattactggttggcacctttacttccccatatattgagcagtttaacgaaaggatcagcgtaaacggaacgccggtgacggatgcagacctcgtccgccttacaaacgagatccgcccgcttgcagaagaactggagcacacagcattcggcgcaccgacagagtttgaagtcattacagcgatgtcacttttgtattttgccgggatccggcaggtggatattgttatctatgaagtcggccttggcggcaggcttgattccacaaacgtcatcacaccgcttgccagcctgattaccaatatcggccatgaccatatgaatgtgcttggccatacgattgcagaaatcgcctctgaaaaagcgggcattatcaaacacggggtgccggttgcaacaacagccatgctgcctgatgcgctggcggtaattgaagaaaaagcggcaaaagaaaaggcgccgcttttccgtgccgggcaggaattttctttcgcggagatcggcggggatctaaccggtgaacagttccgttttgcttccccgtacggcgcctatgaccgtttgtcgatcacgatgatggggcgccatcagatttacaatgccgcccttgctgttatgggggcggaactgttacagcatttccaccatttccgcatcccgcagcatgcgctggaaaaaggccttctcgaaagcaaatggatcggccgttttgaaaaactgctggatgacccgcccgttatcattgacggcgcccacaacccggaaggcattgatagcctgatcgaaacgatggacacccatctgcgcggaaaaaaaatccgcatgattttttccgcacttggcgacaaagacttggatcacatgattccaaaactcgaccaaaaaacagacgaaatcattttcacaacttttgattttccaagagccattccggcagaggtgttgtataagataagccgtcatcaaaataaatcattttctaaggattggaaagaaaccgtacgcaccaaaataaaagaaatgaaaggctcagaagatgttttagtgattacagggtccttatactttatttcaaaagtccggaaatacattttgggccaatcagagagaaaagggcagagctgaaaaagttctgccctttttgtttatttgttcttttgttgaattactttcccggcgctttttgataaaataagttttataggtaagaaggctcatgacaaaatgcttacggaggttgctatgaaaaaacccctttttaaaaacagccggggatttacacttgtcgaagtgctggcttcgattacgattttagcgattgtgatgcttacagtgggagccatcttggccaataatgcgggcgtgacaaaaaaagcggatgactcgctgtctgcattgcaaattgcaaccgggatattaagagcttaccagaaaaaaaactttaatgaagtgcagcagatggcgaacaccacacaacaggctgatattcaatcggttttagggctggacagcgatgcggaaatttccggttataaggcatatgtgtccgtttcccttccggcggattcttctctttctgatcgcctcctgctggtcaaagtgaaagtcgacactggaaataatccaaagccggttgaagtgaaagggtatgtgaaaaaatgaaatgccggaatgaaaaagggctcactttagtagaattactggcggctgttaccatttcatttatcattatcggggttatttatgccgttttaaattcggtgatcacccaatccaaaagcgacatggcccgtaaatactttgtcaaagaacaaacggcaattttgcaatatatggagagaacaatggaaaatatagacgacgttgaacctgatgacgaaagtgatgacgggacttttacccgtttcaaagcagtggctatcaatatagatgttgcgggtgacggtacctaccagaaaagttcaacagacaagacaatcgctgtatcagacgggaatttgtcggtaggaggcaccattgtaaacagcgatgaaatttcacttgacgggacaacttttacggtcgagaacggcagcctgatatgccattttgtaatgaaagacacgcaaaatcatttcgagaaaaagatctatgcctcttataaactgggcgaagagggggatcaatgatgcatgttttaaaagaagagaaggggtatacgcttgtgacagtgcttctcattttcgcagtcgcggcgatcatcaccgtttcgctcgtatccgcatccgtcagcacttttaaaacagtaaaagtatctgaaacgggcacccaggataaattaaacgcggaaatggtggctgatgaagcgactgctttaattgagaaacaagttgacagcatcaacagtgttattgcaaccgggactgtcatgccaagccagctgatcagcatgcttcaggcagcaataaccaacatacagcaacagaaaaacggaaaatgcagcatcgaatataaaacattgaaagacgggacagcgccagacggcattgttttgggcaaagtcaccatttccgttccggtcggaaagtccggaaaaacgttaacgaaggtaatgacgctttccactgtctcggatgtttttcaatatacagccgtgacaccgtcgaatatgtatttgtacggatccccttatattatcggagatgtgaacatcggtggaaatttgtatgtttcaaattacgggaactatatagatgggtatacgaaatatattcaaacttactatccggctatcaatgggacgttaacagtgaagggaagatattatgaggccggtcagcagccggtcggaaaagggatatcaacgccggtatacaacttttattcatggaatacatttggacctgaaagcttcaaaaagtacttttctgttgccccggttgtgaaaaatcgccagttaactgttgataaaataaatataggcgatatgattacggccaaggcgctgaaatggccggaaaatgtaaaaataaattcctacgattcttacaatatagacaagaatgggaacgcttttggttatgatgtaacagccagccaggttggcagtcaaccgataaaaggaaacttgtacgttggcgatgatttaatcgttggggaaaacaaaagcctgactgtaaatggggatctttatgtaaaagatgttttgactgtcaaagggaatttaacagtaaaaggcaaaatttacgtaggtggtgatgccgatttaaacggagtgctgtcgacaggggcggataagtatatttatattgccggagatgctactttaagcgacgtttcagcattaaatttaaacggggtgatgtatgtcaacggttcccttacgagcaagggggatgtcaatacgaacggcagcatttatgtacgtggaaacgcagacgtcgagaatttctcgaacagtaacggcacgcttattttactctgtgatggaaatattcagctggccaacaataatttgtataaggacaacccaaaagtgattgatgcttatctctattcaaatagtaacttatttatatacggaatcggatcaaacttgaaaattaacggcggtatttatggaaacaccattagtttaagtgcatcaaggggcagtacgattaataagccaatttatgctgattggttcaagataatctatgaattggaatttcaaaatccccagcctgcggatcctgcaaagtccagactgaccgttaattttaaaaaagatatgattttaaacccgccgaaagggatcccgaccgtgaataaagtaactttgaaagaaatcaatacatcggtccaataagatacagttaaaaagatgcaggtatgtgtaaaattttacgtctcaactactcaagcagcctgtacgcccgtcagtgggcgtaaagcacggatcagttgccctgcattcaagcagttcatcggcaatgggacatttaagcaaaatattagagctttcattttaagcctggctcagtggggactgatcgttgaggcgcgcgaaatttacgagactcctgcgggaaaagcgagccaggagagaccccgcagcgaggtacgagcgaggaggctcgccggccgcccgcggaaagcgagtgaatttcgcgcgcctcaacatccccgttgtccatctttatacggaaatatcacatcttttccgaaaattacaccgagcaagtgaagcacggtagccgaaagtgtacaaaaagagtgtcttggaatacccgatatttaaaccttgtcgagaaaaacttgacacatacaagatgcagtacaatcttcccatccaccgtgatttataataaaatagtcttagttgattttcgataattggtttttctggaaatattgtactctgacagaaacagaggtgggatgatggatcttctcactgcggcgtttgccgtgattggatttttatgcgtaattgccgtttttgtctttttttctttcggattttccaaaaaaggcgtggttgtgctggccggcaccgcttttttgctggcgcttttcggcattttggcgggcaatgtggttccgctatgggagagctgtttgattgtttttttgctcgtgctttgtgtggcttatctgttcgaaaaaaagctggcatttttgttcgctggaaaggataacgatgcagacgaatttccagcatgggatgagcaagaagagctggcggtgatgcgggaaaaccggccggcagcactggactggcctgccgcaaatgacgcggttctcccggctgaaaaaagtgctccggctcctgaaacgaaagagattttgccggggaaaaacggcccgggacccgaaacagaaagtaccctgccagaagaaaaggatgaaccggaatgggaagaactggaggatgcggccggaaacgaaacgggaaccgctctaccggaaaacgaacaggcggcagaacgctccggggaagaagaaattgcgtttcttgaaaaccgcatggaaatgcttgaagaaacaaatgaagaacatgcggttgatcaattgcctgaaatgtatggagttgaagaatgggttgcggaagcggagagcccggacaccaaccctctagacgtggcaaccgcaaaagaggcggatgaccagaattccgaagctgttgtaggaaccgggccgggaacgccatccggttctgaaaatgttccatatgttgaacaagaagagatcccgctcctttcttttgaaaaggaagcggaagcacctgctgcactttccgggaaaggcatgcctgccgtggacgagctggaagaaatcgataggatgcctaaccaggaaaccagaaagacggaaaaattcgggaatctttcggaggcaggccacggcctccaagaagaaaaaggcgcaggtatggacaacacaactgcaaaaaaagaggagacggccggaaacactgctgttgaggaagcgccggcagcagcagccgtgccaaacgggacaacgcctattcaaaagcaattgcttggggtgctgcttgaacaactgaacctttaccgccttacgcagccagctgatgcgtacgaacagcttgtgaaagcccatttgcacccgcagcttgcgccggaagattatttcacttttgcaagccttctgatcgaccattacatagctgaacaacaatttggcaagctgcgttctctgcttaggggcttggcggaaacatatgcggaatacccggtcatccgcgaagaaattgattttttaaggacaaaatacggtctataatccatgaggaaacaggtgtgaggtagatgaaaaaaagcacgcaaattttggggcagccgatcatcagcatttctgaaggcgctgaaatcgggaaagtaaagtctttcgtcattaacccggacaaaggatccgtcgatttttttacgatcgagcacgaagactggcaagtaagcgtaaaagcgattccattcaaaaaagtggtcggcatcggcgagtatgcggtcaccgtggaaagcgacagggctgttattgatttaaatgaaattccgatcgcagaccagctcgtcaacaaaaaaatccgcattgtcggcgcgaaagtaatgacccggaaaggagaactggttggcgaagtaaaagaattttacgcggatgaaaatacaggcaaaattttaggcattgttttgcaaacaggcgagtcggaaacgatcctttctgctgactttgtcatgacgtacggaaaagatattgtcgttgtggaagaggaagcacccggccattttcttgacgatcctgaagaactgctgaaaaaagaagagaaagaggatcttgaacaaccgggcgaagcgggaatggaggcgctccgggctaaacaggtggaacttttaaaaggaaagaaagtgtcaaaagacatttacgcgggaaacggggaacgggttatcacggccggaacggttttgtctgaagaagacattaagcgggcgcaggaggccgggccgggtgttcttgttgaattgtccatgcatgttgatgaatgaaaggcggcgctgaagtgtgggaaacaagcggtttttaaaagtgtttacaatcttattgatcagcacagcttttatattcagtttctcacattttggggctttggccattgagaacggattcggccataaagaaaaatatgcgcagggcactgcagccgggggaatagagctgtccgggctgactgaagagcaggcacggcaaaaattatcggctgccgtgcagaaatggaaggcatccaattcggcagaaattgtctatttgtcaaaaacggggaagcttccggctgggctgctgcatttttccgtaacagaaagcatgctccgggtaaaaaacgggcaggcctcgtcacttgttgttacgcttgacaataacgggcttcggaacctggtctcaaagtcttttccagacgtcagcccggatgacgtggatatttcccggctggacaaggccatatgccatgccgctgccaggcttgagaccaccaatctttcctttgatttgtccggttatgccctggacgggagcgaaaaagaaacgacagtatcaaaaggttccgtatcaaatgtttcgattgcggaagcaacggagctcgaaaattgggcaaaacagtttccggaagtcaacattcctgcgcacgggatgttttccttattaaaaacagcggaaaaaacaggcgcttctttttcaaatgaagcactcagcatagtcgcaaccgcagtatacggggcggtgctgccgaccaattttgaaatcattgaacgcaatacggggaacgaactgccgtattatgcagcgcttggaaaagaagcgaaagtggtgaaaggaaagctggatttctcttttgtcaacccgaacccaaccgcttatcagctgaaatttacggttcataacggtgttttttccgtttctgtggcaggccggccttttctcgaaaactataaaatggtgctgaaagataaaaaaacgattcatcccgaaacaaccgtgcaatttcaagccgctttaaaaacggatcaatctgttgtcgtgcaagctggaaaagcaggttattatgccagggtgttccgcaatatttacagccggaatcacggcctgctgaaatccgtgctgttggcggaagatttttatccgccggtggcacaaatggttgcaaaaggcaatccggcgcaaacggaaaacacggatggctcatcggaaacagataacggttccggtaatgaaacggacacgccaacaagcggcggcaattcagaaagcagcggaaaaagtgccggcgcggaggctgcgaaaagcagcggaaaaaatgccgatgcggaagcttcaaaaaagaacggaaaaagcagcagcacaaaagctggaacttcaaatgacagcaaagacagcaccggtacgcatgacggcaaggataacggggcggacagcaaaagctgacataagaaaggcccgggacatgacagataaagcgggggaattcggatgaaacaagtgcgaaaaaggcttggcgatttattggtggatgcagggttgattacagaagaacagctggaacaggtgctgaaggaaaaagcggcgggccaaaaactgggcgatgcgcttcttcagcgcgggctaattaccgagcagcagctcattgaagcgctcgaattccagctcggcatcccgcacatcagccttttccgctatccttttgaccagagcatcatgaaccttgtgccgaaagaaatggcgaaacgaaatcttcttattccgctcaaaaaagacggggataaactgtttgtcgcaatggcggacccgatggattttaatgcgatcgatgacttgcggctatcgaccggcttccgcattgaaccggcgattgcctcgaaagacgatattttgcgggcgatccataagtattacgacctcgatgacaatatggaagaattgctggacggcattgctgaaaaggaagaggcggctgaaaccggtccgggggaagaagattcgcctgtcgtccagctcgttaaccagattttgcaaaatgccgtccaaatgcgggcgagcgatatccatctggacccgcaggaaacaaagtttatcgtccgttaccgtgttgacgggattttgcggacggaacgggtgctgccgaaatcgatgcaaagcgtgcttgtggcgcgcattaaaattatagcaaatcttgatattaccgaacaccgcatcccgcaggacggacgcattaaaattgacgtcgatttccatccggttgatatccgggtatcaacgctaccgaccgtattcggggaaaaaattgtgctccggattttggatctgtcaacagccatccatgatatccaccagctcgattttaacaagctaaatctcaagcgttttacgcagctgatccaccgcccgaacggcatcattttaataaccgggccgaccggttccgggaagtcatcgactttatatgcggccctaaaccatctcaatgatgaacaggtgaatatcattacggtagaagacccggtagagtaccagattgaaggcgtcaaccaaattcaggtcaacccgggggtcggcatgacgtttagcaaagggctgcgggcgattttgcggcaggacccgaatattatcatggtcggggaaatccgggacaaggaaacggctgaaattgccatccgcgcttccctcaccggccatctcgtcttaagtacgctgcataccaatgatgcgctcggcacgattacgagattaatagacatgggcgttgagccgtttctcgttgccacctcactcagcggtgtcgtatcgcagcggctcgtgcgcaaagtatgccgcgactgtgcagaagaacaggcgccgacaaaacgggaaatagaaatttttaaaaaacgcggcatcaaaattgagaaaatcatccgcggccgcggatgcggaaactgcaacatgaccggctataaagggcggatggcagtccaggaactgctggtgatcaatgaaaacatccggcgcgggattatgaacggggaacctttgtccaaattaagggagtatgcaatccaaaataaaacgatttttctgctcgatgacggattactaaaggtaaagcaggggatgacaacgaccgaagaagtgttgcgcatcgccctgccggagtaggtgaaaagaatgaaggaaaaaatcgagtacttgcttcgctcggctttcgaactgaaagcatcggatcttcacttgtccgttggcgtgccgccggttctgcgtttgaacggccggctgaaacgttacgggaaagaagtaatgacgccgcaattgacggaaggaatggcaaaagcgatcatttccgataccatgtggccggtttttcaggaacgcggggagcttgatttttcttacggcatcccgggcgtatcccgtttccggatcaatgtgtaccggcagcgcaactgcgtgtccctggcgatccgtgtcgtcccgactgcgatcccgacagttgaagaactgcatctgccgcctgtgttgtatgcgttcacggaaaaaccgcatggcttagtgctggtgacagggccgaccggaagcgggaaatcgacgacgcttgccgccatgatcgaccatatgaacaaaacgctgcacaaacatatcattacgcttgaagacccgattgagtatttacataaacaccaaaaatgcatcattgaccagcgcgaagtcgggtttgacacgcaaaactttgcgaacggcctgcgcgcggcactcaggcaggacccggacgtgattttagtcggggaaatgcgcgatctcgaaacgatccatacagcgattacggcagcggaaaccgggcaccttgtccttggcacgctgcacacatcgggcgcgccgtcgacaattgaccggatcattgacgtttttccgccgtcccagcaggcgcaaatccgcatccagctggcaaatgttttagttgggattatttcgcagcgcctctttccgacagccgacaacaaagggcggagggctgccacggaagtgctcgtcaacaacgcggccattgccaatctgatccgcaatgaaaaagttcaccagatcgtgaatgtcctgcagacgagccgcgcattcgggatgcacacgcttgaaaccgatgtgaaggaattgcttgcagtgggcgcgatttccaaagaagcggcagaaccttatttacaggagattgtccacaatgccacgatttaagtacgagggaaggacaaaagccgggaagaaaaacggcgtcgttacggccgaatcgaaacgggaggcgctggtcaagctgcgcgggcagggcgtccgcgtgctccaaatcaacgagctgccggaaacgttaatgacgatggaaatcagcctcggcggcagggtgaaactgcaggattttgtcattttcctccgtcagttttcaacactgctgaaagccggcgtaaccgtcgtcgattccacaaacatactcgccagccagacgagcagcaaaacattaaagaaaacgcttttggccgtcgaggaagatttgcgcagcgggattccgctttcccaggcggccgcaaaacataaaaaagtgttctccccgatgttcattaacatggtttacgccggtgaagcgggcggcaaccttgacggcacattggaaaggctcgcaacctactacgaaaagcagcaccgcacaaggaaaaaggtaaggtcggcgctgacgtatccggcttttgtcggggtgatggcgattgttgttgtcatttttatgctcgtgaaaatcgtcccgacctttgtttcaatgctcaaaaactataacgccagcctgcccgcggtcacacgccttgtcttgtcagcaagcgggtttatgcagcattattggtggcttgtcgtgctgattttgatcggggtgtacgtgctgctggtcgttttgcgcaaaaacaaaacaagcaaattttatttggattatgcggtgctcaaattcccgattttcggcaagctcgtccaaaaatcgatcattgcccggatgacgcggacattgagctcgctgttttccagttccgtgccgattttacaggcattgtcgattgtggaggcaatcgtcgaaaacgaagtgatgacaaaagtgctccgccaggcccgcgatgcgctggaaaaagggcagtcgatgacagaaccgatgcggcgccactgggtctttccgccgcttgtcacgcagatgattgcgatcggcgaggaaaccggtgcgctggacgccatgcttggcaaagtcgctgacttttacgaagccgaagtcgaagccgccaccgaccagatcaaggcgttgattgagccgtttatgatcgttgtcctcgcagccgttgtcggcacgatcattgccgccatcatgatcccgatgttcgaaatttataataatgttcaataaattggccaaaaaaggtaggattatgcaacacaaccatgtataatataggtaaaaagatctaggatattaggaggagaaacgatgttaaacaagaaaaggaagttattgaaaaatcaaaagggctttacgttgattgaactgttggcggttattgtgatcctggccattattgccgcgattgcgatcccggcgattgggaatgttatcaagaattcgagatttaatgcgattaagtcagacgctatacaagtgattagtgcagcaaagctctatgtttctgacaatggtgtaaagtctccgcttagctataacgacttgaaatcttatattgatgatcaagattcaaaattggttactccagataaagacaaagacaaccctcaattttcagtttctgtttcaacaaataacagtgatggtaagactgtatataaatttacaggttatggtgaagacggtgatgttaaaattagatttaatgacgctgatttgaaaaccattaatgcagcaaagagaagtgcaactaagtctgaaaatgatgtttatattattgggaattgaaacaatattaattattttcatttcactcaaggcctgccctctgtgccaggccttggttactggtttttaagatttctagttaaggagccatcatgatgccacgctcattttttccttcatcaaaaaaaaccggaaatttcattattaaagaccatgtcatccgttttctcgaattgaggcaggccgatccgcctgttgtttcaaaaatgggcgagcggtatttgccggaaggggtagtccgcggcgggaaaatcatcgatgccgagacgcttgcgatgatcgctgaagaatgtcttggtgattgggggctgaaaggaaaacacccagttcgttttgctgtgcccgacaattttgtcgtcgtgcgccaaattgctgttccggatgagattgccatggatgaaatggaaggttatattacccttgagctcggttccaccattcatttgccgtttgacgatcctgtatttgactttgcgctccttggtgcatcgaatcaagaaaagcaggtgttgttatttgctgcgccccgggatgtcgtcgaagattatgccgatttttttaacggcatccgcctgagcccggttgctgccgatatttccccgttatgcgcctatcggtctttttatcatttgaatacgttgaatgcgatggaccacctgctcctactccagtttgatttgtccacggtcactgcaaccattttccatcggcatttcccgctgcttaccagggagattgaagtcgatattccgctttccaaatgggagacggagaccagtgcttttggcgaaaaaaagtaccgctggccggagggcgacccgctgctccgctaccagacggaaaatatcgataaagagctagacagaatcatgaattattaccagttttcgatccggaaagggcaggatgcagtcaatcaaattttgctgaacggcgattatccgtatttgcctggggttgcggagaatcttgcggagcagtttggccttccggtcacgatgattgtaacggaaaaagtatcttccgtaaccgggcagccgtttcccgcccgctttgcgcctgttttgggccttgcactgaaagaggtgaaatagatgctcgttgagattaacctgctgccgaaaaaagaaccgaaaaatatcgcattgctcttttgggccgggatactggccggtgcatccgccatctttctcatcgtcttctttattgcgctccatcagacaaaacaggaccttgctgctgtcaatcagcaaatcaaacagacggaagcgctccaggccgctgaacaggcagcacaaaaaagcaatgcggacatacaggatttcaaaaagctttcgtccgccgttaaatgggcaagcgatacgccggtcaagacggtgccggtattggacaagcttaccaaacttttgccgcaatacggctatatcacggacttttcctgcggcagcacaggcgcgaatgtgaccgtccagtttgattcttctgatgaagcggtttactttttaaaacggctgaatgacagccagtacttcagcggcgctgtcctggacagcatcaaaatgaatacggaaacggccggtgcttcgtcaagcggcacagccggcgcggacaatgtggcaaccggggaagcggaaggcgtcacggtttatgaagcgacatatacgatccagctcaatcaagccgcgctcaatgccgccggcaaaagggaggaacagcaatgaacctccgtttaaaccggaagcagctttttatcatgcttgccctctttgccgtttgccttgccggtgcagccggtttgtactggtttgtgctggcgccggccaagtccgggctggccgggcaaaaagccgcgttgaaatcggaacagcaggtgctatccagcctgcagtcaaaaaaacagcaaagcccggaactgcagcttggcaatgtcgtcagcctgatgcggaaaatcccggcaaaaccgcttgcggaacaagtgctgcttcagttcaggatggcagaggccctttccggcagccggattacggaaacagacgcccagcaggactccgccggtacgtccgggagcgaggaggctacacaaagcacaacgagcggcacctcatccggcacacagcaaaaaacagacggactgcctgccggtgtcaaaaaactgtcgtatactttaaaagtggagtcagacagctacaagagcatgaaaacatttttacagacgattgaaaacttgccgcgcattacggtgatcgaaagcctcaatttcagtccgggggaaggagcgcctggatcgagtggattgcagtacaccgtcacggtttccactttttattacccggcgttaagccggtattcggactatttgccggaaatcgacgtgccggcagcaggacataaaagtgacccggtcgcaataaaggggcaataagttttcggcatgttcatccttgccattacatatgcttaatatcgcccgttgcttgccggtagcgaaccaagaaaataccatatgctgaaagatcagagggatcaaacatgcatggattatggacagcttattttgcggcactggggatggttttcggctcgttttataatgtcatcgggctgcgtgtgccgaatcatgaatcgattatccgtcccgggtcgcattgcccgaagtgcgggcactcgttaagctggaatgaaaatataccggtattgtcttttcttattttacggggcagatgcagaagctgccgcgcgccgatctccccgatttatccggtgtttgaggcgctgaccgggggcttgtttgcctgttccttttaccggttcggctggagccttgaatttttgcttgccattttgttcatttcgctgcttgtcatcattaccgtttccgatttggcgtatatgcttattcctgataaagtgctgtttccttttgcagccgccattgccgccgtccggctttttcacccggcatcgccgtggtggtccgcctggctcggggcggttttcggcttttgcctcctctatctcattgcctttttcacaaaaggcgcgatgggcggcggggacattaaattgttttttgtgatcgggcttgtgctcggcatagagaaaacttttctggccttttttctggcctgcctctttggcgcgctttacggcgtcggtttgatggctgccggcaaatttaaaaaacgaaaaccggtgccgtttgggccgtttatcgccatcggtgcgcttaccgcctattttttcggaaacagccttatcgggatgtatttgcgtttctccgggctcggataaaatttgcataaaatgccggaaatcggcgaatggtttttggacaaggcgacaaaagtcttgttcttttttttgccggttatggtagcatgaagcaaatcgggcaggagaggtgaaagcattggacaaggcgaaaaaaaaggcgaaaattacagtcaaagtgggcggaaaaaaggagcagccggaagacagcgtaaaagtccatgactggaaagcggccgaggaaacggctgccgcacaggaagacagcgcaaaagaagaggaatcatttgaatgggtgctgcccgaactcgatgcggatcagattgaagaattccggccgatccattatacacccgcgcccaaaaagaaaagcatcttcccgaaaaaaacggcggcgaatagggccgcgccggcgattttgttttctgtcgtgtccgcagtggtgtttggggcgctgctcgggtttgttgtattaaaatttattgcgtacggagatcatcaaacaaaactcccgaatcggcaggctgaaggcgctgcaacgggcgcagcacagcaagaggccaggcttccggcgctaagcatcggcatcatccaggcaggggtgttcagcacggaaggcgccgcctctaaagtgtcgcgcgaactcgcctcaaaaaaggtcccgtcgatgcagctttcgatggacgggcagcgctatatttttgcaggtgtggccgacagccctggcacggccaaaaaaatggaaagtgcctggaaagacaaaggcgtcgaactgtatgcaaaagaaatcagtttttccagcaaaaaggtccaaacgacgacaaaggatgagcaaatttttgcccgggaaacggttccgctttttcaaaaactggcaaaagaaacggccgccgctgtccagaacggagaggtttcaccggacggcatgaagacagtcggaacagcagccggcaacgtcaaaaagctggcaaaagtcaggcaggaaacgctcggccggctgaaaaaatacgaaacggccgcgtatgaatcgctcgcggcttatcaaaaaagcggcaaccggcaggatttaacggatgccgaacaaaacctgctggactacgtaaaggtctacagcgggcattgaaaccaaatgcgggcttccggctgaaaagctgcggtgccacgaatgcccgcatggcactatttttttgtctgaaaaggttgaatttgcagttgttacacggcccgttttttggtacgatacaattgtatctcccatacaaaagcccattggtttgattcccccgcctcctgctttagaaaaggaggaattcatttggaaaaaatgctgatcaaagattttcctgcagaagaccgcccgcgtgaacggctgatccgcacaggagcggagagcctctccaatcaggaactgcttgccattttactccgtaccggcacgaaagatgaatcggtgctcgagcttgccaacaggctgatccgccattttgaaggcttgcggtttttaaaagatgcttcccttgaggaaatgacagccatcaaaggcatcggcacagcaaaagcggttcagattctggccgccattgaactcggcagaaggatcgccaatttgcagcacgatacgcgttatgtgatccgcacgccgcaggacggggccaattatgtcatgaatgatatgcgctttttgtcccaggagcattttgtctgcctgtatttaaatattaaaaaccaggtgatccaccggcagacgattttcatcggaagcttaaatgcctcgatcgtccatccccgcgaagtgttcaaagaagcgctcaggcgttcagctgcttccattatttgtttccataaccatccatccggggacccttctccttccaaagaagatagtatgtgtaaaattttannnnnnnnnnnnnnnnnnnnnnnnnnnnnnnnnnnnnnnnnnnnnnnnnnnnnnnnnnnnnnnnnnnnnnnnnnnnnnnnnnnnnnnnnnnnnnnnnnnnaaaacttgacacatacaagaagatatcgaagttaccaaacggcttgccgaatgtggtaaaataatggggattgagattcttgaccatttgatcatcggtgagaaaaaatttgtgagcctgagagaaaaagggtatttgtaaggctttgaatttttttatggttacgatataataaatcgtatgatttttacggccggcactgcgccggaaagcctgaatccggatgcattttcaaagcggcatccataaataagcaaaagtatggcaccaactggtgatgaaaatttatcgtgaagaaagggagatacatccatgttcggaagtaaagacctggggattgatcttgggacagccaatacattggtttttataaaagggaaaggaattgtcgtgcgggaaccttccgttgtggctatccagacggatacgaaacaaattgtcgcagtcggggatgccgcgaaaaaaatgatcggcaggacgccgggaaacatcgtggcgacgcggccgatgaaagacggcgtgattgcggattatgaaacgacggctgcgatgatgaagtattatattcagcaggccacaaataaaaaaggctttttttcaaaaaatccgtatgtcatggtctgcgttccgtccggcatcacggcggtggaagagcgcgcggtgattgatgcaacccgccaggccggggcaagggatgcttttacgattgaagagccttttgcagcagcgatcggcgccgggctgcctgtctgggagccgaccggaagcatggttgtcgatatcggcggcggcacaacggaagtggcgattatttcgctgggcgggattgtgacaagccagtcgatccgggtggccggggatgaaatggatgaagcgatcatcagttatatccgcaaaaattataatcttttaatcggggaccggaccgcagaacaaattaaaatggaaattggttcagcaggcgagccggaggggatcgaaccgatggatatcaggggccgggatttgctgaccggtttgccgaagacgatcacgatttccgcggatgaggtggccgatgcgctgcacgacacggtgtatgccattgtcgatgcggtcaaatacacgcttgaacagacaccgcctgaactggcagctgatattatggaccgcggcatcgtcctgacaggtgggggtgccctgttgcgcaacctcgaccatgtcatcagcaaagaaaccgaaatgccggtgctcattgccgaaaacccgcttgactgcgtagcaatcggaacaggcggcgcgctcgaaaatattgaactgtttaaaaacaaagcaaaagattctaaataagaagaatgtcagtgtcctgttaactcattctcctgccggctttcctggcgggagaatggttttcaatccgggaatggccggaacaaagtgttatgggagtggattttatgccacagttttttttgaataaacgattgatcgtccttttaatcagtgttatcctgcttgtcgccatgatcgggttttccatcagggaacgcgaccggatttcaaaaccggaacagtttgtgcgcgatatcgtcgggctcggccagtccgtcattgccaaacctgccaatgcccttgccggtttttttgacaatatcgaggacttaaaaaatacatataccgaaaacaaaaaactgaaatcccatttggaacagttgacaagcctggaagcgcaaaatcacgaactaaaaaaagaaaatgaaaatttgagatctattataaaggaaaaaaacagtctcggagattcagagtccattcaggcccaggtcattgcacgcaacccggataattggtacgagcaagtggtgattgataaaggcgaagtcaacggcgttgccaaaaacatggccgtcgtcacttcaggtggtttcctcggaaaagtcacgcaggtcgacaaattttattcaaccgtcgaacttttgagctcgcccgatgaaacgaaccgcgtatccgccaaagtgcaaaatgccaaaaaagatgcttacggattaatcgaagggtacgacaaaaaaaccaaaatgctgcttttgaaacagcttgattttaatatcaaagtcaaaaaaggcgatcatgtcgtgacatccggtttaagcggcatgtttccgagcgggcttctgattggtgacatcgaaaaagtgaccccggatgaaaacgggctgacgcaaaccgcttatgtcaagccggcagccaatttttatgatgtccgcgaagtgctcgtcatcaaccggaaaacacaaaaattcaacgcgggcggcacgggaggagggcagtgatgaaacgtatcgtgctccctctgattttaagcctgtgctatattgctgaaagtttatttgcccaattttttgcggcccgttcttttggcggaaaatttaccatcgttccccattttctgctcgtgatgctgattttaatggggatgcattaccgcaaaaggctctccatcatttatgcctttgtattcggcatgctgtttgatgctttttacacgggcattttgggcatttatctgtttttctatccgcttgcggtttacctgacagaaaaaatggacaggatcctccaatccaatatttttaccggcacgcttgtggcagtcttaaacatggcgattgtcgaatttttggtctatggcatcaatgctttaattaatccgcaggtgatgggatttgacgattttctcttgttcaggctttggccgactttgatcttaaacgccgctttttttattttggcatggtatccgatgggaaattttttaaagcggcgcgcaagggaagaagaaaaggaataaccggcggggagaaaatctgttaaaatgggaaagaaggattccctgcctttttgtcgaattatccggacaagggggagtggaaaaagcaaaggggtttgcgggccgaaaccagccggaaccgcacgcacggaggcttattcttgcgtgccgggccgaaaaacgccgtctgaaagccatttcggatggatgccgtttcatttatcagccgttgaggtgagcagtttgaaatgaaaaaaacgcaaaatgtaaccataaaaggcacgaaagacggaattgtgctgcatttaaacgaccaatgctcctttcaagctttaaaggcggagttagagcaaaaattactggcccaggctgccgatgaggaagagaacagcccgattcttgccgtcaaaattcagcttggcaaccgttatttgacgcccggtcaggaagaggagatcaaaagccttgtgcgttcccggcggaaccttgttgtcgatgaaatcatcagcaatgtcatcacaaaagaagcggctgcgcgcgaaaaagcggaaaatgaaattgtgcctgtcaccaccatcgtccggtccgggcaggtgttaaaggcggaaggcgatcttttgcttatcggcaatgtcaatccgggtggtaccgtgattgcaaacggcaatatttttatcatgggaaacctccgcggcattgcgcatgccggctacagtgggagaagggacgccgttgttgtcgcttccaatatggttccatcccaaatccggattgccaattgcctgaaccgggcccctgatgattacggggaagagggccggcatgagatggaatgtgcttacatagatgaatcggaccatattatcattgataaattgcaagttttgaaatatttgcggccgaatatgacaagattaaaaggagggttctcatatgggtgaagcgattgtcatcacatccggaaaaggcggcgtcggcaaaacgacgacatcggcaaacctcgggacagcgctcgcgcttctcggaaagaaagtctgccttgtcgatacagacatcgggctccgtaatcttgatgtcctgctggggcttgaaaaccggattatctacgatctggtcgatgtcgtagaaggccgctgtaaaatccaccaggcaatcgtaaaggacaagcgtttcgatgacaagctctttttgctgccggctgcccagacaagcgacaaatccgccgtcacgccggaacaaatgaaacaattgatccacgggttaaaacaggattacgattatattctgattgactgcccggccggcattgagcagggatataaaaatgcagtggcgggtgctgaccaggcgattgttgtgacaacgccggaaatctcggcggtaagggatgccgaccggatcgtcgggcttttggaaaaggaagaacatatcgagccaccgaaactgatcatcaaccggatccggagccatatgatgaaaagcggggacatgctggacatcgatgaagtgacaaaccatttatcgatcgatttgatcgggattgtagccgatgatgaagaagtgatccgcgcctcgaaccagggcgaaccgattgcgctaaatccgacgaaccgcgcatcccttgcctaccggaatattgcccgccggattttgggggaaacggtgcctttaatgccgcttgaagaccagaaacccggcatgtttgcgcgctttaaaaaattatttagttcgaaatcttcttaatggcagagccgtttctgaacgtttttccaaacgatcagggcggcttgttttgttcccggttctaaccgctttggacaggtcatacattggtaataaacgaatgcctgtacagaaggggtgaatcgattgggaaaccgcgccgatgaaatccggaggcaaatggcgaagcggagaaaaacgatgaaacaggcttataacggcaaagaaacggtctatgcgagcctgattaaggatgaaggcacacatgtatatgaaccgccgggcaaaacgccgcatccgctttttaaaaaagaaacggtgctatttaaaattctggcttctgcctgccttgtcctcgctgtggcaattctgtttaaatcggaacgtccggaatttgacaaaccgaaagccgccgtcaaacaggtaatggcgtccgaatttcaatttgcaaaagcagccgcctggtatgaaaaaaagtttggcaagccggtcgcgctctttccggaaaaatcgtcaaaaacggaaaccgctgcttccaatgaagattcgcaatatgcgatgccggtatcgggaaaagttctgaccagtttttcagccgatggaagaggggttacgattgaaacaaagccgggcgcaagcgtaaaagcgatgagcggcgggacggtcatttttgccgggaaaaagccgaaactgggcaataccgtcattatccagcatgccgattcaacggaaacatggtacgcaaacctcagcaaaattgatgtgggccagtatgacagcctcaagacgggcgaaaaggtcggcacggcgcgaagcagcggggaaaaaggggaattttattttgcgcttaaaaaagacggcggttttatcgacccgatccaggtgattaaatttgaatgagcggttttggcttctgaaaaaaatcaaaatccatccccttttctgggccgtggccgccattgcagctgttaccgcccgtttccaggatctcatcctgctgtttgcgatcattttcatccacgaaatggggcacgcggttgcggcgcaatatttttcatggcgggttaaaagaattgccattttgccgttcggcggcgtcgctgaaacggaggaacacggaaaccgcccgctgaaagaagaactgatcgtgacacttgcaggccccctccagcatatttggatcgctgttttcgcgcacgtgttgttccgtttcgatatcttgcccgggcagatgtatacacaaatcggggagtggaaccgggccattcttttttttaatttgctcccgatttggccgcttgacggcgggaaactgctgaatatggcgttttccacggtctatccttttttgcgcgcattccggatgacgatttgttgttcgtttatcgcgctgttcctttttcatgcggccgccctgttgaatgcgccggcaaatttgaacgtctgggcgatcgtcgtttatttatatgccgcactttggaaagaatggaaacagctttactttgtttttatccgtttcctgcttgaacggtattacggaaaaagggaaccgctccgccatctggaaacgatcgaagtggatgcgggcgcatacttgtatgaagtgcttgaaagctttaaacgcgggcgcaaacatccgctcattgtccttaaaaacgggatggaagtcgggaaactcgatgaaaatgaactccttcacgcctttttttccgagaagcaaaccaatgcgaaagtaagcgatatactgtataattattgatggcaatcgcaatagaagcggctgaaagcgaagacagtgtggtggaatttttggacaggtcaatcatcatcaatgtgaaaacaagggaaaaacggtatgcggtcatggaaaacggcgaagtatccgccatccgcatccggcagccgggcggcgcggcaaaagtcgggaatatttatctcggcaaggtggcggacgtcaaacccggcatcaatgccgcgtttatcgatatcggcggaggccggcacggttacttgcatatcagccggcttcccgcttttgtgcacggcaaaaatccaaatgccgcgatttccgcttatctttcgcccgggcagacggtcatggtccaggtgaaaaaagatgaaacagggcaaaaagggccgcttctgaccggcatcattgagctttcgggggaacagattgtgtatctgccggaaggaaagtacacggctgtttccaaaaaagcggatgatgcggaccggaacaagtggcgggcctgggcccgcaaagcgcttgaaccgcaggaagggattattgtccggaccgcggccatccatgccggcggggacgggtggctcgatgaactaaaatccctcaggcttcggtacaaaagcctgctcgaaaaggcggcacaactgaaagcgccggctgttctgcacgaaaaaagcacggtggaagcggaaattttccgcgaacttgcccgtttaaaaagcggcatggtgattgcggacgatgcggaggcgcttgcccgcctgaaagcattgcttgcgggccggccggaactggactggtcgtttgagctctatagcggaagacagaatatttttacccgctaccgtatcgaccgggcgcttgaggatgcgttgaaaagagtggtctggcttgaaaacggcgcctatcttgtcatcgacgaagcagaagcgctcaccatcatcgatgtgaataccggaaaatatacgggcacaacggaccaggccgagacggtgctgaaaacgaatctgcttgcggcgaaagaaatcggccgccagctgaaactgcgcgattacggcggcatcattctcgttgattttatcgatatgcagcgcgatgaacagcgcgcgcaagtgagggcggcgctagaaaaagagctggaaaacgacgagaagcaaacccgtatcaccggttttacggagctcggcattttgcaaatgacacgcaagaaaacgcgcaaatcgctccccgaggcactgctttccgtttgcccggtctgcgggggcagcggcaaaatcgaaagccccgagacgcttgctttccgcctcgaacgcgagctgtgggaagcgccgcacgcggattacgaagccgttttgattgaatgcacgcaagatgtgaaagattgtttttgcggggaaacgggggtacacttaaagcggctggaaaacctgctcggcatgaaactgttttttcacatctcccgcgatgcgcatccgttttatgccatccggcagttcgggcccctgtccgcgcttgccgcaaaaggcaaagatcccaattgacaaaggaaaaagtgtgtgttaccatcagtatgttatgtttgtagcgccctgtgctacaaccgctcaggaacaggctttccaagtttttacgcttcgtaaaacgcctgtctttggcgagtctgagtcttaaggaggtgcagtgatgtacgcaattattgaaaccggcgggaaacaaatcaaagtagaagaaggccaggctgtatacattgaaaaattggatgcagcagaaggcgaatctgttacatttgaccgcgttctttttgtcggcggcgaatcggtaaaagtcggcagccctgttgttgaaggcgctacggttacgggtaaagtggaaaaacacggccgtgcgaaaaaaatcgttgtgttcaaatataaagcgaagaaaaattaccataaaaaacaaggccaccgtcagccgtacacaaaagtggtcattgaaaaaatcaatgcgtaaggtgcacgcggcatgatccgggtccgcatcaaacgcaaaaagaatgggaacatctcgtcttttgaaatgagcggccatgccgaatttgccggatacggccaggacattgtctgtgccggcgcttccgctgtttctttcgggacggtgaacgccattatggaagtggcgggggttgaacctgaaatccgccagtccgaaagcggccttttggaatgcaaaatccctgcgcagctgccggaagaacaggcggcaaaagtgcagattctgcttgaaggcatggttgtatccctcgagacgatagaacgggaatacggcgaatttatccatataacctttgaataggaggtgagcatcatgttgaaattagatcttcagtttttcgcttccaaaaaaggggtcggctccacgaaaaacggccgtgactcgatcgcaaaacgcctcggcgcaaaacgtgcggacgggcagttcgtaacaggcggctcgatcctttaccgccagcgcgggacgaaagtctttccgggcgaaaacgtcggtcgcgggggcgacgacactttgtttgcgaaagttgacggcgttgtgcgttttgaacgcctcggccgcgacaagaaaaaagtgagcgtatatccggtggcacaagaagcctgacccataaagccccgggctgcgatattcgcggcccggggcttttgcattttccgtcagtacaaacgccgcgtctgtaccgaaaaacgtacaaaaaccgcgctgccgcacccgcctggcgagtgcgctatccattcgcgccccgtgcaacctggggcaatttttgctatacttaaacataacctatttcggagaacgggagctatgaaaatgcgggaatggacgacggttgacgtgcttcgccacgccaggcatgactggctgaacaaggtgcagctgatcaaaggatacgccagcttgaacaagatggaaaaagtcaaaaatattgtggaagacattatccgggaaacgcagcaggagtcaaaattatcaaatttgcatcggccggaatttgccgaacttttgcttacatataactgggaagggcacacggtgcagattgcatatgaaatattggatgtagaccggaatgcgctcccggatgacggggagctgaccggctggatgaatcattttctcgcggctgttgaggaagcagccgatccaaacggggacaaccggttatatatgtcggtcagcactttgccatccggtgcccgtttctttttcgagtttagcggaacaataaaaaagcgcggactgcttgccgggtttctggaaaacgattgcccggggatgaacgtgatccacgcatacccggcatccgctttcccggttgaaataatctttccgaaagcctaacgatacagcaattgcaaaggtggttttatcttttatgtttgtggaccaggtgaaaatttatgtgaaaggcggggacggcggcaacgggatggtcgcattccgccgcgagaaatatgtgccgatgggcggccctgccggaggagacggcggccgcggcggcgatgttatttttgaagtcgatgaagggttgcggacgctcatggacttccgctacaagcgccattttaaagcggaccacggcgaaaacggcatgagcaaaggaaaacacggccgcggggcggaagacatgattgtcaaggtgccgccgggtacggtcgtcatcgatgacgatacaaagcaaacgattgccgatttaacgcgccacggggaacgggcagtgattgccaaaggcgggcgcggcggcaggggcaatatccgctttgcgacaccggccaatcccgcaccggaaattgccgagaacggcgaaccgggccaggaacgttatattgtccttgaactgaaactgctagccgatgtcggccttgtcggttttccgagcgtcgggaaatcaaccttgctttccgttgtctcttcggcacgcccgaaaattgcggaataccattttacgacgcttgtgccgaatctcggtgtagtcgagacggaggacggcagaagttttgtcatggccgatctgccggggctgattgaaggcgcgcacgaaggcgtcgggctcggccaccagtttttgcgccatatcgaacggacacgggtgatcgtccacgttattgacatggcggcggtggaagggcgcgacccgtatgaagattatttgacgatcaacaaagaactgaaagcttatcatgaacgcctttctgagcgcccgcagctcattattgccaataaaatggaccttccgggcgcggaagaaaatctggcggcatttaaagagaagctgggcgatgatgccgcacgcgtcttcccgatttccgcggtgacgcgcaagggattaagggatgttttgtttgcgattgccgatttgctcgatgaaacacctgccttcccgcttcacgccggcgaagaaccggatgcggaaccgtcccgtgtattgtacaagcatgaaaaagaaaaggctgattttaccattacacgcgatccagacggcagcttcgtcatccacggggaaaaagttgagaagctgtttaaaatgacgaatttcagccatgacgagtctgtccggagatttgcccgccagctgcgcggaatgggcattgatgacgcgctccgtgcacgcggcgcgaaaaacggcgataccgtccgcctcttggattttgagtttgaatttgtagattaaccgtgctgggccggggaatcccggctccgagtggaggaaagggcattttggaaaagaaagcagagcataagtttatcttggtgcgtgaggatgttttgccggaagcgatgatcaaaacacttcaggcgaaagaactgctggaaaggggacaagcggtatcagtcggggacgcggcgaaaaaagcgggcttaagccgcagcgctttttataaataccgcgataccgtttttccgttccattcagttgtaaaagaaaaaattgtgaccttgtttttttatttggaagaccggtccgggacattatccgaaattttaaggatcattgcgtcttattcatgcaatattttaacgattcaccagacgattccgatacaggggcgggcaaatgtcactgtctcgctgaatgtgtccgggatcaacaggagtttaaatgatctgctggaagaactgcaggcatttgagtttgtcaataaagtagaaatattagggtccggagcctagaactccgcccggcgggggagaggaaatgaaagcagcttttttcgggccggaagcgacgtttaccgatatcgctgtccagtcagtgttcccggaggccagccgggttgcgtaccggacgattccggaatgcctggaagccgttaaggcaaaacaggtggatatggcggttgttccgcttgaaaatgccctggaaggttcggtgaatttaacggtcgattacttgtatcatgaagaactgccgccgatccgtgcggaaatcattgtgccgatcgagcagcattttatggttcatcctgcaaatgccggcgcctggcgagaaacggaaaaaatcatttcccattcccatgcgcttgcgcagtgccaccagtttctgcgccgggaattccagcatgcggaagtggaaccaatgggctctacggccgctgctgcgaaatatgtgagcgaacacccggaactgaaatggggggcggtcgccaatgaaatggcagcggaactgtacggccttgaaatcgtcaggcgtgccatccatgattatccgtttaaccatacgagattcattgtcctttcaaatgaggagcttcatatcgaaaaaacgcctgatttcctgaaatcgacgatcatggtcacactgccgacggacaaggccggctcgctgtaccaggtgttgtctgcctttgcttggcgaaagattaacttgagcaagcttgaatcgcgaccgttaaagacggggcttggaaactacttttttatgattgatctgaaccactccttagaggaaaagcttgtccgcttttcgcttgaggaaatccatgcgctcggctgcaccgtgaaagaactcgggacctattacaggtatatggcggatgaatgatggccgcttcttcaatattgttttgataagctcggctggaacccgggcttattatttttttgcaaaacaagctttaaacccggttttttaggccggatgggagataaaaaagagctgtcctttatgttcagggcagctctttttcattttctgcaaataaaatgccggcttctttcagcgcctgttccgcttcttcaagctgtcgcccgcttgtggcttcaaccgtatgcaggtggatgccgcccgttaattcggataagtagctggcatttgtttcttcaatgcggcggataaaccgggccacttctgcgcgggtggagaccataatcgaggcggtcagatcgccgtataccggatgctccactttgacatcttttacggtcaccccgtggtccacgagcaaattcagctcctgtgcaacctgttcgcgcgtatgcatgcaaacaagcgttttttccactttgttttccgcaccggcggggtgtatgtacaaatatccctggctcgttgccaggatcggctcgtttttcgctttcaggagcgtaatatcgtttacaataatctgccggctcacatttgtccttttcgccagctccccgcccgtaatcggctcccggctattctgcagccattcgaggatcaaatgccgccttttttccccgggaatttttttctttcctgccaacagcgtttcctcccattcattcggcctcattcggattttatcatacgaaggcgcccggataaaagaatcaatccttttagtgcataaaggacgcgggacgttcataagtttttatgtaaaatcaatcgcattttgcccggcaccacatagaatgtatggacttaagccttgaggaggggaaatgtgtgaaaatccatatcgtgcaaaaaggcgatacgctttggaaaatcgctaaaaaatatgacgtcgattttgacgaactgaaaaaattgaatgcgcaattatccaatccggaaatgattatgcccggcatgaaaattaaagtcccgacaacgggcggcatggtaaaaaaagagacacatacaggccatgcaggctacacgggccacgcgggcataaaagaaatgccgctcgtgacccatccgtacgagcaaatgcctgaggtaaagatgcctgtggcgaaagaaatgccggttcaaaaagagttgccaaaagcggcgggaccgaaagaaatgccggtgaaagaaaaagtggttgaaaaaaaagaaacgatttataagccggtaatgccgcaaccggtcattcctgaaattgacatccataattactatgtgaccaatatggctgaaatcgaaacccatacagcggcaccgccgccgaagcaccatgaaagcgaatcgtcggaaagcatgcactacaccatgccggtaaaggaagagtgcccggaaatgtatgtaccatacaatccgtgtccgcccgtgatgccggtatacgattgcggctgcgggggagaggacatgcacgccggatttttcccgcatcctttcagcatgtcttatccgcaagtcccgtatccaatgccgtacccgatggcctatccgcaaatgccggtgatgtccgcgccggcaggatttatgccgcaacagcagccggcgtggcaggaggggcagcaagtgatgccgggttacgaatgggaagaagaatcttcttcatcttctccttacccgtatggccccagtatgcaggcaggggtttctgcgcaacatcctgccgccgtgccgcaatggggagcgcagcaggctcctttatacggcgctgcttcagaaagccccgcttatatgccgcagtacatgccgccgcaaaccatgccgcagtacgccccgtacccgccgcaccagccgcagccatgcgggtgccaaaagcaaccgtacgccggcatgcaggaatcgtacgggatggcggcgcaaccgtacggcatgcaggaaccatttggcggcatgccgcaaccgccatacgggatgccacaaccgccatacgggatgccacaaccgccatacggcgtgcaggaaccgtacgggatgcaggccccgttcggctatgaccggggcgaaaaaacggaccagccgcaggaaacccgggatccttccggcgaagaagaaaaataatgggcggcggaagacaagaaggagacgaaaccaaacgtctccttctttatgcggaaaccatgctgcaggaacccattgttcactggcgcaggttgcgcgaccgggtgtggcttgtctggacaaagacaaaaaaagtgatgatgaagcaatatggttccgatgcgcgccttaaacggcaaatgctgcttacatcggaactgcagaaaagcggtttcactcaaacttgccgttttctggaagatgaaagcggcagcccctttcaaggcaaaacttttggctttatggcatacattgaagaagacccggccggtttcaacttcgggacggaagaagacatccgcgccgctttccgcctgttaaaacagtatcacgaaaagactgcacattttccgcaagccgtaaaaatggaatttccacgcttttttcagctgagaaaatggcaggcgcggtaccgtgcatttcttgaaaacaaagaacagattgtccgatatttgccggaaacgtatttcaccgcgtacgaaagatgggcaggcgaggcgttaaaccggctcgaaaaaaaacagcattggcttcaccacccgccgtactgcatcacgcacggcgatgttgcccaccataattttttgcgtgcgaaaaacgggaaactgtatttgattgattttgaccttgcccgccttgccccggcctggactgatgatctccagttttgcaaccgggttttgcccgctgcttcatggtcgcttgccgcccttgaaaactggggaatgctggacggcgcgccggaccgggaaacttttctggaggcgcttctttacccgacggatgttttaagggagtggaaccgttttgctggaagcggcaaaaaagaaaaagagcagtactggccgcatctttccctgctttcaattgggcagttcggggaacgcgcccggtttcaaaaagaagtaaaaaggcgtttgcaagcataacggaaaaccaggggcgctccccgccggcataacgattttcatcctcctttcgggcgagtatggtatagtaatagtggactgtatcagcgctgtcagaaaggagtgatggccatgtccggccattccaaatggaaaaatattcagggcagaaaaaatgcgcaggatgcaaagcgcggaaaaatctttcaaaaactggcaaaggaaatttatgtagcggcgaaaaacgggcctgatccggaagcaaattcaagcctccgcctggtcattgaaaaggcaaaggccgccaatatgccgaatgacaatattaaacgcgccatcgagaaagcaaacggcagccaaaacgccgaacattacgaggaaataacatatgaagggtacgggccgggcggcgttgccgtcatggtcacggctttaaccgataataaaaaccggaccgcttcgaatgtccgtgttgctttttcgcgcaacggcggaaatctcggcgaaaacggatgcgtgtctttcctgtttgaccggaaagggtatcttgtcatcgagcgagaagggctcgagatagatgaagacggaatgctgcttgccgtgattgaagcaggcgccgaggaaatggaaacgagcgatgaagtgtttgaaatttatacagacccggagcaattcatggatgtgaagaagaatctggaggaaaaaggctttacatttgcccgggcagaaatcaccatggtgccgcaaaacacaattgctttggatgaagcgcaaaaagaaaagatggagcgattgctggacaggctggaagacgatgacgatgtaaaggaaatttaccataacgccgaattataatgtcccaggcactttctgcacccggcnnnnnnnnnnnnnnnnnnnnnnnnnnnnnnnnnnnnnnnnnnnnnnnnnnnnnnnnnnnnnnnnnnnnnnnnnnnnnnnnnnnnnnnnnnnnnnnnnnnngccgggtgcagaaagtgccttttttgcggcaaagccggttaggcctgtatcaaaccggctacaatgtggagtgtggcccgtgctattttaaaccgatgcactgcggctaatcgtgccatttaaacccgggcgattgttccagctgaaaatccggggaagcccgtccggaggcagcggcggcccggtatgccggacggacactcatctgtctccggatgccggtttccttccgccatggaaacaggaaaagcgcctcatctttaggaaccatccggccggaaaaaagggcaagaccggacattcgttcccaaaacggttgcgttctgtggtacaatatgggatagcaagtttttgaggagcgtgtgggaaggttgtacgaatatattaaaggcatcattgattccgtgagcccggattacgttgtcgtggaaaacggggggatcggctaccggctgctggcgccgaacccgtatattttttcaaaaagcatcgggcaggaacgaaaaatttttacataccagcatgtgcgcgaagatttgatcgcgctttacggttttgaaacggcggaagaacgggcgctgtttcaaaagctgcttaatgtttccggcatcgggccaaaaggggcgcttgccattctagcgtacgggcagccgcagcaggtcgttgacgccatcgagaatgaaaatgaatctttccttgtcaaattccccggtgtcggcaaaaaaacggcaaggcagatgattcttgatctgaaaggaaagctgcaaggcctcgtgccggagatgccggatgatgtgggcggggaaaaagcggcgcctgcttccggcaaccaaaacctcgaagaagcggtgctcgctctggcggcgctcggctactcggaaaaagaaatcgcgaaagtggtgcctgaacttccggaagaagtgctttctgcggatgaatatattaaactcgctttaaaagcaatggtaaaataatggaggaggggagagcatggaagaccgcgtagtttccggcgaggcaaacgaacaggaagtttcctttgaaatgagcctcaggccgcaaacccttgcgcaatatatcggccaggatgaagtgaagcataatttagccgtgtttattgaagcggcaaaaggacggcgcgaaacactcgatcatgtgctgctttacggtccgccggggcttggcaaaacgacgcttgccgccgtgatcgcaaacgaaatgggcgcgaacatccggacgacttcagggcctgccatcgagcggccgggcgatcttgccagcgtgttaaccgcgcttgaaccgggggaagtgctgtttattgacgaaatccaccgcctgccgaaagcgattgaagaagtgctgtacccggcaatggaagacttttgccttgatatcgtaatcggtaaaggatcgggtgcccgctccatccgccttgatttgcccccgtttactttgatcggggcgacgacaagggctggttcggtttcagcaccgctgcgcgaccggttcggggtgatcagccggctcgaatattataacgaagcgcaactggcggaaattgtgctgcggacagccggcatccttgagacggcgattgagcctgagggggcggcggaaattgcaaggcgttcgcggggcacgccgcggattgcgaaccggttgttaagaagggtgcgcgactttgcccaggtcaaaggagacggaaaggtaacccttgagatcgccaattatgcccttgaacttttgcaagttgacaaacgcgggcttgaccatattgatcataaactgttaaaagcgatcatagagcgcttccggggcggtcctgtcgggctcgacacgattgcggccagcatcggggaagaaagggaaacgattgaagatgtatatgagccgtatttgctgcaaattggctttttgcagcgaacgccgcgcggcagggtagcgaccccgctttgctatgcgcattttcatatggaggtgccggaatgagcggatttggaaaagtgctgatgaccatcgccgtgattctttttgctctcggcctgttgttgcagtttacgaaaatcggccggctgcccggcgatatcctcattaaaaaagggaacacaaccttttattttccaatcgcaacatcgatccttttaagcgtgatcttaagtgtgttattatatatcattggacggttcaagtagccgcaaatggaattcaaaacgaaggggaagcaacaatgaaactcgatttatttgattatgacctgccggaagagctgattgcccaaacgcctttaaaaaaccgttcggacagccggctgatggtgctggataaaaaaacaggggaaattgaacacagcgtatttaaaaacattacgcaatacctgcgcccgggggactgccttgtcctgaacaatacaaaagtattgccggcaaggctgatcggcataaaagacgaaacaggcgcaaaaattgaggtgctgcttttaaaacagctcgaaggagaccggtgggaaacccttgtcaaaccggcaaaacgtgtgaaaacagggacggttgtccggtttggcgacggaaagctttccgccgtttgtgcggaggagctggaccatggcggccgggtaatgaaattccggtacgaagggattttttacgaagtgctgaatgaactcggaaaaatgccgctgccgccctatattaaagaacagctcgaggaccaggaccgctaccagaccgtgtatgcaaaagaaccgggttctgccgctgcgccgacggccgggctccatttcacggaagcgttattgaaaaaaattgaagcaatgggcgtgaaaatagtctatattacgctccatgtcggccttggcaccttccgtcccgtcaatgaggaaaatattgaaaaccatgatatgcatgcggaattttaccaggtatcagaagaagcggcccgcacgattatggaagtaaaagaaaacggcggccgtgtggtctctgtcggcaccacctccacccgcacacttgaaacggtggcaagcgcccatggtggaaaaattgccgcctcaagcggatggacggatatttttatttatccgggttatcaatataaagcaattgatgccctgatcaccaatttccacctgccgaagtcgacgcttattatgatggtaagcgcattggcagggagggaaaatattttgcatgcctacgagacggcggtaaaagaaaaataccgtttcttcagtttcggggatgcgatgctgattaaatagtggaaggagcgcatcacttggctgccattacttatgaactgatcaaaacggaaaaacatacaggcgcccgcctcggaaaactccatacgccgcatggcacctatgataccccgatgttcatgccggtcggaacgctcgccacggtgaagacgatgtcgccggaagaattgaaaacaatgggggccggcaccattttgagcaatacatatcatttgtggctgcgccccgggcatgatattgttaaagaggcaggcgggctgcacaaatttatgaactgggaccaggcgatcctgaccgattcaggcgggttccaggtcttcagcttgagcaagatccgggacattacggaagaaggcgtccatttccggaaccatttaaacggggacaagctgtttttgtctccggaaaaatcaatggaaatccagaatgcgctcggttccgatatcatgatggcattcgatgagtgcccgccgtaccctgcttcttatgaatatatgaaacagtcggtggaaaggacagcgcgctgggcggagcgctgtctccgtgcgcatgcgcgccccggtgtgcagggcttgttcgggatcgtacagggtggcgcgtatgaagatttgcggcttgaaagcgcaaatgcccttgtgtctctcggcttcccgggctatgcgatcggcggcctgtccgtcggcgagccgaaggacgtgatgaaccggatgctcgcatttacaacaccgctacttccgtcggacaagccgcgttatttaatgggggtcggttcgcccgattctttgattgacggcgccatccgcggcattgacatgttcgactgcgtgctgccaacccggattgcaaggaacggcacggtgatgacatcaaccggccggcttgttgtcaaaaacgcacagtacgcccgcgatttccgcccgcttgatgagcattgcgactgttatacatgccggcactactcacgcgcttacatccggcatttgattaaatgtggcgaaactttcggaattcgtctgaccacttaccataatttatattttttgttaaaattaatggaaaatgtaaggcaggcgatccgcgaagaccggctgcttgatttcaaggaagaattttttgagcaatacggatttaaccgtccggatgcaaaaaatttctaatacaagcaacttaagaagggaggattcagatggcgtgggcccagttactgcctttggtgattctgtttgtgctgttttatttcctgctcatcaggccacagcaaaaaaggcagaaaaacatccagcagatgcagagcaatctggcgaaaggggacaaaattgtcactatcggcggcttgcatgcaactgtggattcgattgatgaaaataaagtcgtcttaagatgcggcgatggcacgcggttgacgtttgaccgctcggcgatccgtgaagtgacggaatccgttgcagcgaaaaaagcaaaagccgaaagccagaaagtagacaaaaaagcggcagaaaaaaatgccggggaaaagaaataaaaaaagcgccgcgcgatgcggcgcttttttcaggtttcccgcgaccttcccgagaagaggttgacccctaaaatgccccccattgcggcggcaacaatatagcaagcatgataaatggcctgtttcactgtaaagagttcattataaccaagatactggacgagaaaaacaatcgctgtgtagaggatccccgtcaaactgccgagaagccaccctttctttttcccttttccgcccccgacgagccccccgagaaataaactgaaaaaagaaatcatcgtgaccgccatatgcaaagcatgctccgtcatatctgaaaaccgcagaatcagtgaaatcacgaggcttgatatggcaagcaggacaaaaatggcgcccagcccgtaaacaaggccgatgctatatttttgcgctccgattttcattctccccctttggcaagcttttttcctcagtacaagcatatgcctggaaacagcaaaaagaaccgagcaaaagatttttgagagttttttaagcatgctgcgcatactaaatacatgattttgaccgaacggggggattggcgttggaaaatttattgattattttttttcggacactgctgatgtattttgccattcttattattttccggttgatgggaaaaagggagatcggcgaactgagcgttttggatcttgttgtgtttatcatgatcggggagatggcggtcgttgccattgaaaaccacagtgagcccgttgtaaatacccttttgccgatggttgtcctgctcggcatccaaatcgcgctggcgcttttctcgctccacagcaaccggttccgcaagctgattgacggcaagccgagcattctcatcagtaaaggaaaaatcgatgaaaaagaaatgcgcaagcagcgttacaattttgacgaccttttgatgcagctccgttcaaaagatattgacaatattgcggatgtggaatttgcgattctggaaacttccggggagctgtcagtggtgaaaaaaagcaaaaacaaaaacaaaccggcatcctatacggaaccgctcattgtcggagggaaaatccagcaaaacaatttaaagaaaagcaacaagaccgaagcatggctgcgcagcgagctgcaaaaaagagggtacggggatatcagccggatttcgttttgcagttatcaggatggcgagttttatattgatctggatgatgtgcaataagcccggccggaacatgcagggcctattgctctttttatagccatttattcaggatcggaacatacatgagatcggaccggcggatcaattttgtcatcacaagcagcagagcataaacagccacggtcaaacaaatgcccgctaaaagccgcaggaaagatgcgtcttgcgccattataccggtgaaccaccagtgcccgaatgcgccggaaacgaccgaaacagccagaagcttggcccagtcatggacatacagggtaaactggatttttttcaaaacggttgcaaaatgaagaaaggtcacaagcaccattcccgccatgatgccgatcgcggcgccgttgatcccgaactccggtcgggaagcaaggacaaaaatggtgcccaatttcacgactgccccgatgatgctgttgatcatcgccgcttttgccagatccaaagcctgcagtgcggcctggagcggtgcctggcatgcttgaaaaataaaaaacggcgccatgattttgataaactgtgccccgtttgccgtcccatacatcgcctgcatgagcggttccgcaaagacatacaggatgacaaccgagatgccgccggttaaaagggaaaaacgcaatgcctgctggagcctgtgttcaacaagcctggcatttttccttgaattggcttcgctgatcgcaggcacaagggcggttgacaaggaaaccgtcacaaaagacggcagcatcaacagcggcatggcaaagccggttaaagaaccgtactgttttgttgcaagatgtgaagcgacaccggcaagggtcaggcagtgggagacgacaatcggctcgaggaaccaggagaaattgccgatcagccggctccagacggtcggaaccgccacgcgcatcagttcgtaaaacgtgtctttccctgattttacggctttgaaaaaatgtttgcggacgcggatctgctttttcaatttaaacatcgtaaacatataaagaagggatgacagttcgcccaatatggatgcaaacattacgccggctgccgcatattcaatcccgtacggcagaagcaaattggcaaaaaacgcaatcagcataatccgcacactttgctcgatgacctgtgagacggcaaaaggcttcatgttttgcttcccctggaaatagccgcgcaatacagcggaaaccgctacaatcgggataattggcgtgatggcggcaagcgggtaatagacgcgcggatctgtgaataaatggtcagccagatacggcgccagtaaaatcagcccgggcgtaaaaacggccgacagcgaaatggtaaccgttaaggaaatgacaaggatcttcttgatttttaccctgtctccgaccgcgtctgcttcggcaatgcatttcgagatcgcgaccggcagcccgagctgggttaccgtaatgacgagcattaaggtcgggaaagccatctgatggagcccgacgcccgtttccccgagcgaccgggcaatgacaatccggttgataaatccaagcacccttgttacaaaacctgcggcgagcaatataatcgttccccttaaaaacttggacattctgttaacctgccttctcaaatctgcaattttcctatacaatgatgtatatgcacggtaatggacaagaatacatcaatgctcaggaaaggggcagaacgtgtgaaggaccgccatccgtatgaaaaatactataaaaaacttgaacctgcggttaaaagcaaggcggaagaactggccgtcttcggctacgggtcttttgaagcaagggatgtctgggaatatttaatccggaaagtgtggaaaaatccggatccggcgcatgtccgcatgtatgcgcttgtttccgacgttttaacggttaagcccggcgatttgatgagttttaaaaccgtggaagcttaccgttcgccaaactggtttgccgagctggacgaaaaggagctggatgcgctttttaacggggaaaggacggaagaataagcgggcaaataagcaaaaccgggcatcctgctgctgcatgcggaataataagaaaaattgacacgctttttgccctgcatcataatagaaatgatattgccggaagcatgtattttcggcatgctacatgttttgattcgctaggaggctgtacataatggtgaaaaggagccgcatcgttgccttctttctcattgtcctgctgtttgcgggattaatagggggaacgacggataaagttgtgaaaaaaattaaccttggccttgatttacggggcgggtttgaagtgctttacaaagtggaaccggtcaaaaaagggcagaagattgataaagccgcgcttgcggatacggcagccgctttggaccggcgcgtgaatgcccttggcgtcagcgaaccgcagatctcagtcgaaggcaacaaccggatccgcgtccagcttgccggggtgaaagaccagaacgaagcgagaaagatgctttcgacaaccgcgaacctaactttccgtgacgtcaatgacaaagtgatgatggacgggacggaccttgtacagggtaaagcgaaacagtcatttgaccagaacggcaaaccggatgttgtcctgcagttaaagagccggaaaaagtttgccaatgtcacgaaaaaaatcctggcgatggcgccgaacaaccagcttgtcatttggatggactttcaaaaaggcgattcctataaaaaagaagtggcaaagaaaaatccgaaatttttgtcaaatccgagtgtaaattctgttttaaatacagaccaggttgaaattaccgggaactttacggtaaaagaggcgtccaatcttgcagacctgctgaatgcaggggcgcttccggtgaagctgcacgaaatctattcgacatctgtcggcgcgtctttcggccaggaagcgctgcatgatacaattcttgccggaataatcggcgttgcagccatttttctctttatgatcggctactaccgttttccgggttttatcgcatgcattacgctgtccgtttatattttcctgattttgctcgtttaccgtttaatgggcgcggtactgacgcttcccgggattgctgcgcttgtcctcggggtcgggatggcggtcgacgccaatattatcacctatgagcggatcaaagaagaactgcgcgtcggcaaaagtgtgaaatcggcgttccgggcggggaacaagtcatcgttcgtggccatttttgattccaacatcacgaccattcttgcggccatcattctcttttatttcgggacaagttcaatcaggggatttgcgacaacattaattatcagtattctgctgagctttctgacggctgtttacggttccagatggctgctcggcctctgggtaaacagcaatttcctgaaaaaacggccgcactggttcggcgtgaaaaaatcggcgatccacgatattgctgaaaacgttgatacgcatgatttgaaaacaaagtttgactggtacgactttgtcaagcaccgcaatattttctttgcgatttcagctgtgctgatcatcggcgggtttattctcctttcgattttcaaactgaatctgagcattgatttttcgagcgggacgcgcattgaagtcagttcaaaccatgcgctcagccagcaggagattcagcgcgacctcgaccatttgcatttgaaatcagaagatattgtgatgcagggggccaaccggcatcatgccgtgatccgggtgaaaggctcgttcagcgacaaagagaagagcacaaaaatcaaccagtattttacagagaaatacggaaagagcccgagcatcagctccgtttcaccgacagtcggaagagagctggccttaagcgccgtgtattctttgctgttggcggcagtcggcatcattatttacgtggccttccggtttgaatggagaatgggggttgcctccatcgtggcgctcttccatgacgcctttttcatgatcgcctttttcagcatcacaaggctcgaggtcgacgtcaccttcattgcggcggtcctgacgattgtcggttattccatcaacgatacgattgtcacattcgaccggatccgcgacaatttaaaccggcggcggaaaattaaaacggcgaaggaaatccatgatattgtcaatgccgggatccgccagacactggcccggtcggtcaataccgttttgaccgtgctgatgacgtccgtggctctcgccattttcggcagcgaatcgatccgaaatttctcgatcgcgctgattgtcgggttaattaccgggacatactcgtctgttttcattgccgcacaaatctggtttgtactgaaaaaacggcagctgaaaaaacacggctccattctcattcaaaaagcgcggcgcacccgcgcggatgaaccgcaagtataagaaaaatgcaggcgaaaagcctgcattttttgtaatgacagttttcctccgaaacgttataataaagtattgtgaaagaggtggggatatgctgcagtcaagaacaaggtggcgggtgccggaaaccgatccggaggcagccgcaacgatctcgcaacaattgaacgtttcgccacttgtttcaaaattgcttgtaaaccgcggcataacggatgttgaagaagcgcggtcttttttattccatgaaggggcagaataccatgatccgtttttgctgcatgatatggaaaaagcagccgcccgtatccgcgaagcgattaaaagggaagagccggttctcgtcttcggcgattacgatgcggacggcgtaacgagcaccgcgatcatgatggccgttttaaacgatcttggcgcccgtgcggaattttatatcccggaccggtttaaagaagggtacgggccaaatgaggcggctttccggcgggcggctgaagaaggattccagctgatcattaccgtggacaccggtattgccgctgtccacgaagcggaagtggcccgcgaactggggatcccgctcattattacggaccatcacgaacccgggccggtgttgccggaagcttttgccatcgtccatccgaagcatccggaaagtacatacccgttccgggaactgtcgggcgcaggcgtcgcttttaaagtcgcccatgcgctgtacggcaaagtgccggaacaacttgaagaactggccgctatcgggacggtcgcggatcttgtgccgctattggatgaaaaccggctgattgccgcaaacggcatcaaacggctgagaacaacaaagcggccggggcttgcggcgctgtgccggtgtgcggatatccgccaggaagagattaacgaagaaacaatcggctttgtgctcgccccccgcttaaatgcggccgggcgcctgcaacatgcggcaccggcagcagaactgctgatgaccgaaaacgcagaagaagccgggatgctcgctgaaacgattgacgggctcaataaagaacggcaaaaaatcgtaaacgagatgacaaatgaagcaatcgaaatggtggaagaagaagtggaaaagggggcgcgtgtccttgttgtcgggaaagaaggatggaatgccggcgtaatcggcattgtcgcctcgcgccttacagaacgcttttaccggcctgcgattgtgctcagctttgatccggaaacagggctggcaaaaggatcggcgcgcagtattgacggcttccatatgtttaacgaattatcgaaatgcagggatattttgccgcattttggcgggcatccgatggcggcggggatgacgctttctttatccgatgtggatgaactgcggcgccggctgaacgaacaggccgcggcattgccggatgagatgtttgtgccggttacaaacatcagcgctgaaatttccatagaagaagcagggatggaagcgatccgcgaaatggcattgctctcgccgtttggcacggcgaatccgaagccgcttctgttgctggatggggcctattgcccgcaaatccgggcgatcggcgcagacgggaaacatttgaaattggcgctttccaaaaacggcacaacgctcgatggagtcggcttcgggctcggaaatcttgccccgcagatttccccttctgcctgcatatcggttgtcggggaactgtccatcaatgaatggaataatatccgcaagccgcaaatgatggtaaaggacatcaaaatcacaaactggcaattgtttgatttcaggggcaacaggcctttaaagcaatgggtcgggcacgtcccggaagatggccaggcttttgttgtgttccaaaaagaaacattgcggaaactgccgctgccggatttttccgtccaccttgtgccggtggcgacaatggaagaggcaagggcatttgacccggcaaataaaaatattgtgtttcttgatcttccgccaggcccgaagatgatggcggcactgcttgaaggcggtgcgccggccaggatttatgcgtatttttaccatgccgggaaccactttttcagcacgtttccgacgcgcgaacattttaaatggttttacgcttttcttgcaaaaaggaaaacgttcaacctgaagcggcacggggatgagctggcggcttaccgcggctggtcgagaaatacgatcgattttatttcgcaggtgttttttgaacttgattttgttacaataaaggatgggtttatttccctaaaagcagccaaacaaaaacgcgatttaaaggaatcttttacgtatcagaaaaaactggcacaatatcaaatggaaaaggacctgctgtactcatctttccatgagctgaagatgtggtttgaccaaatgatcaagcctgctgtacagtatgaggaggaaacagcaaaatggatttaaaacaatatattgcactcgtccccgactggcctaagaaaggcgtgatgtttaaggatgtgacgcctttgatgaatgatggagaggcgtttaaatatgcgacggaccagatcgtccagtatgcgaaagacaaacatattgatctcgtcgtcggccctgaagcgcgcggctttattatcggctgcccggtcgcatacgaacttggcgtcggctttgccccggtccgcaaagaaggcaagctgccgcgggaaacgatccgtgcggaatatgatctcgaatacgggaaagcggtgctcacgatccataaagatgcgatcaggccaggccagcgcgttttggttacggacgatcttttggcaacaggcggcacgatggaagcaaccatccggcttgttgaagaactgggcggggttgtagccggccttgcttttttaattgaactgaattatttgcacggccgcgataaattgaagggctatgatatcctcaccctgatggaatacgagaatgaataaactgtaaggaaatcggcaaaattgtcggtttctttatttatccttcatccggatgaaatgacgggatggttttgtctgtaccgggaaaaaccgtcttttttcgccaaatttcttccattctgtgtcatttgctttacaatcttcttttttttcatgataataatgacaatatgatattgcaatcatcgattcatatatgtatgtgtcaagtttttctcgacaaggtttaaatatcgggtattccaagacactctttttgtacactttcggctaccgtgcttcacttgctcggtgtaattttcggaaaagatgtgatatttccgtataaagatggacaacggggatgttgaggcgcgcgaaattcactcgctttccgcgggcggccggcgagcctcctcgctcgtacctcgctgcggggtctctcctggctcgcttttcccgcaggagtctcgtaaatttcgcgcgcctcaacgatcagtcccgactgagccaggcttaaaatgaaagctctaatattttgcttaaatgtcccattgccgatgaactgcttgaatgcagggcaactgatccgtgctttacgcccactgacgggcgtacaggctgcttgagtagttgagacatcctgatggattgtttcaagttccgttgctttctctcgcttcttgaacggtgtttcagataggcttctctcaatgtcccattgaaaattttacacatacttcatatattccagtttaaaggtgatttttttatggcgaatgaccgaataatgaccgccgaagacgtcattgacaggacaaaacaatatttaaacgacgaacatgttgaaatggtgcggcatgcctgtgcgttcgccagtaaagcgcatgaaggccagaagcgcaaatcgggggagccgtatatcattcacccgattcaggttgctgggatactggcggatttggagatggatccttcaacggtagcagcaggttttctgcatgacgttgtggaagatacagatgtgacacttgacgaactccgtgaagaatttaacgatgaagtggcgatgcttgttgacggggtaacgaaactcgggaagattaagtataaatcgcacgaagagcagcaggcggaaaaccaccggaaaatgtttgtcgcgatggcgcaggatatccgcgtcattttgatcaaactcgcagaccggctgcacaatatgcgcacattgaaacatcttccccccgaaaaacagcggcggatcgcgaatgaaacactcgaaatttttgcgccgctcgcccaccgcctcggcatttccgccatcaaatgggagcttgaggacacctcgctccgttatttaaatccccagcaatactaccggattgtgaatttgatgaagcggaagcgcgccgagcgtgaacagtacctgcaaaatgtcattgaagaagtgaaggaacggcttgcggatattcgcatcaaatcggaaatttccggcaggccgaagcatatttattcaatttaccggaaaatggtccagcagcataagcaatttaacgaaatttatgacttgcttgccgtaaggattattgtgaaaagcatcaaagactgttatgctgtgctcggtgtgatccatacatgctggaaaccgatgccgggccggtttaaagactatattgcaatgccaaagccgaacatgtaccagtcgctccatacgacggtgatcgggccaaaaggcgaaccgcttgaagtgcagatccggacgtttgaaatgcaccgcattgccgaatacggggttgccgcacactgggcatataaagaaggaaaaacggtcaatgagaaaacgtcttttgagaaaaaattgtcgtggttccgcgaaattctagaatttcaaaatgacaccaataatgcggaagaattcatggaatcgctgaaaatcgacctgttttccgacatggtgtttgtctttacgcctaaaggggatgtcattgaactgccgtccgggtccgtcccaattgattttgcctaccggatccactcggaaatcggcaacaagacgatcggcgcgaaagtcaacggcaaaatggtgacgctcgattaccagttaaaaaccggcgatattgtcgaaattctcacttcaaaacactcatacgggccgagcctcgactgggtgaaccttgcccagacatcgcaggcgaaaaacaaaatccgccagtttttcaaacgccagcggaaagaagaaaatattgaaaaaggccgcgagatggtggaaaaagaaatccgggcgatggaattcgacgtaaaagaagtgatggcagccgacaatatcaaaagagttgccgaaaaatttaattttgccaatgaagatgatatgtatgctgctgtcgggtacaacgggatcaccgcaagccaaatcgccaaccggctgacggaaaaatggcggaagcagcgggattccgaagaaacgattaaggagattgtctccgagcagaaaccggccgcaaagcaccggaaaaaggatgcaggcgtacacgtgaagggcgtcgacaatttactgatccgcctttcgaaatgttgcaacccggtgccgggcgatgaaattgtcggctttatcacgaaaggcagaggcgtttccgtccaccgtgccgactgcccgaacgtgcagaacgaagaggcgcaaaaccggcttatcccggtcgaatgggaaacggatgcggccgaccggaaagagtataatgtcgacattgaaattaccgggtacgaccgccgcggcctgctcaatgaagtcctgcaggtggtcaatgaaacgaaaacgaatatttcagccgtcagcgggcgcactgaccgcaacaaaatggctacgattatcatgtcgatttccattcagaacatcagccatctgcaccgggtcgtggaaagaattaaacatattccggatatttattcagtcagaaggatcatgagttaaaggagccagaaaaatgcgggttgttttgcaacgcagcaaggaagcatgcgtcactgtaggcggagaagtggcaggaagcattacaaaaggctttgtcctccttgtcggcgtaacgcacgaggataccgaaaaagatgcagcctatctcgccgacaaaatcgtccatctccgcgtgtttgaagatgaacagggaaaaatgaacttgtcgcttttggataccggcggggacattttgtcggtttcccaatttactttatacggcgattgccggaaagggcggcgcccgaattttatggcggcggcaaagcccggacaggcggaaaagctttaccatctgtttaaccggaagcttgaagaaaagggggtccatgtcgaaaccggcagattcggggagatgatggatgtccggctggtaaatgacgggccggttacgctcattttggaaagcaaataaacagctaaaaccccgaaaaatctggggtttttccttttcacaaaaaaacgtttccaaaaaagttttggtgtaatatagttgacaattgtactttggatatgcaaagatagatagcgttaataattcggatgcgaattatttcgcaaagaatcatttaaaggttaaaggaagggggatacatggagaacggttcatatgatttgttaaaatcgcttttcaggctgaataaagccatttttcgtttggccgcgaaagacgcggaacagcacggtttaaccgtgatgcaaatgtttgcgctgaatgccatcgcgcttcatcccaatatgcgattaaatgagctggcggacagcctttatttaacgaacagcacggtcagcggcattgtcgacaggcttgtgcagcaggaatttgttaacaggttatcatccaaggatgaccggagagccgttgtcctctgcctgaccgaaaaagggagaagcaagctcaaagcgtttatgggcggcaatacagtgctgaaacaaaaaatggacctgatcacagaacgttatggagcggagttggaaaatctgttaaggcttcacaacgaaatgctggaaattttaacatctgaggaggagtaaactttttatgaacgcaagacggatgattttgatcaatattattattcttgttattctcgttggcggcggttttaccggatattatttttacaaccgctcggtcagctatgtcacaaccgataatgcctatattgacggccagtcggtcaccatcgcttcccctgcaaccggcaaactcgtttcatgggacggcaaagaaggcaagtcttttaccaaaggggataaagtcggcacagttgaagtacaaaacggcgccaatacggtgaaaatggatattaaagcgccggcggatggcacgatcgtgaaaaatttcgcggttgcgaatacgtatgttgcagccggcacaacgcttgcacaaagctatgatttggacagcttgtttgtcaccgctgaagtaaaagaaacggatctcaatgacgtgaaaaccggacaggacgttgacgtgtacgtggatgcctatccgaacaccagactgacaggaactgtcgattcaatcggaaaagcgactgccagcacgttctccctgatgccgacggacagaagctccggcaattatacgaaagaaacacaggtcattcctgttaaagttaaacttgacagctatggcgggctggacctggttccgggcatgaacgtgactgtgcgcattcataagtaggtgaatccgatgggaaaatttatcgcaggttatgttcttttatcggtcattgtccttcttgtcctgaatctcatattaaggaacaggggaaggaagaaaaagatggaaagcccgcttcttgacaagcgggtgccggaaatggaaacaatgcctgcaccgcctgaaaaagcggaaacgcaggtgtcggcaaaaacagatgaaggattggcggcacggccagaaaaaatggaaacgcgccgcgccggaacggacggcgaaaaacgtccgacggaagcgcccagtcgagctgttcctcgggaagtggaagaagggcacggcagggggaaaattgttgctgccatgatgctcggggcatttgtggcgattttgaaccaaacgcttttgaatgtcgccattccgcatattatgaacgacttgaatgtgacggcaaatacggtgcaatggctgtcaaccggatatatgcttgtaaacgggatccttgttccggttacggcatttatgatcagtaaatggggcacgcggaaaatgctgattacagccgtttccctctttacggccggatcggttttttgcgccatttcgacaaacttctcgatcctgatgctcgggcgcattgtccaggcttccggtgccgggatcatcatgccgctgatgatgacggtgttcttaaccatcttcccgccggaaaaacgcggtagcgcgatggggatgatgggggttgccatgattttcgccccggcgatcggcccgacattgtcagggtggctgatcggccattacgactggcacattttgttctggattgtcattccgttcggcgtgattgatatatttgtcactttggcatggatgaaagatgtcatgaaaacgacaaacccgaaaatcgattttccgggtattatattctccacgctcggtttcggatttttgctgtacggatttagtgaagccggaaatgacggctggagcagcaaacaagtggttatttccctgatcattgccgttatctcgcttgttttgttcgtatggcgggaattaacgacggaaaaaccgatgcttgatttgcgtgtattcaagtatgatatctttactttaacgacgattgtcagcatggtggtgaatatggcgatgtttgccgggatgattttgctgccgatttatttgcaaaacatccgcgggtttacagcgcttgattccggtttgctgatgctgccgggggcgatcatcatggggattatgtcgccgatatccggctggctgtttgacaagatgggggcaaggccgctcgctgtctttggtttgattatcaccgtctggacgacttacgaatttacgaagctgtcgatgacgacctcctacggccacttgttgttcctatatgttttgcgcagctttgggatgtctttcattatgatgaccatcatgacagaagggatgaaccagctgccaattcatatgaccagccatgggacggctgcggccaacaccgcccgtacggttgccggaagtctcggaacggcatttctcgtaaccgtaatgtccactcgtgccgatttccatacggcaaactatgtcaatgcctatgcaaacctcaacccgtatgtgtctgaaaaaattgcggccatcggacagggcctggcccatgcttccggtctgccttcccagtacggacaggtgcttggctcctatattgtatatcaaaaatcggttgtgaatgcgacgatcagcggcataaacgatgcctttttcgtcgcgaccgggatcgcagcgtttgcgttaattttgtcgttctttatcaaacgcgcaatgccgcagccaaacattaaaaaataaaaaatgccggggatgccccggcatttttttttactgaaaataagcttttaacccgttataaatcccggccaccgccttcgtttgaaaagatttctccgcgatatgcttttcttcagccgggctgctcaagtaaccgagttcaagcaaaatggctggctgtgtattttcacggatgacatggaaatccccgaattttacgcccctgtcaacggtgccgagccggcttgtgatctggttattgacaagccttgcgaaattatagtcctgcgcgtggtaatagtacgtcgtatgcccgcgcgtatgaggatcttcagcgctgtcaaaatgaatgctgacaaaagcatcggcatggtttgtattgctgatggcggttctttccggcaaggatacgtacgtatcgctgttccgggtaaggatgacgcgggcgcctgcttttttcagcttttcgtacagggcattcgccgttttcagcgtcgccagtttttcaagcgtgccgtaagcgccggttgtgccgttatccgttccgccgtgcccgggatcaagcacaatcgtctttcccttgatgcctttttttacagtcttattgcttttttgggcgacatttgccggaatataggctgaaatgccgctttccatcctgattttataccagccgtccatttctgaaactacgggaaaacggtcccctgccttggcggttcccaccgtgtccgagctggattggggccttttgtaaaggcttgtgccggaatggagggtcacctctgcttcactgctgcgctttgcctggctttcgcgcgccacgtagaagcctgcgacccatccgtgcgtgccgtcgtccagttcgacttcataccagccgtggtcggttccggtaatttgcagcctcgtcccgtatgtcaccgttgccaccgtttcgctttgaagcgaaggagactggcggatattcaggctggaggcggcaacaatcgcggcgcttacattgttttccgccgttttcccggcatcccggtttgtttccgtctgtacataccggttgtctgcccagcctgaaacattgccgctttcgatataaacccagctgccttccgtcttggcaaccgtgacagcggcgtttttttcaagcgtaccaatgattgcggcggacttgtccggcgcttttctgatgcgcaggcggtcagcggtgatttttccttgttctgcttgttttgcggaagagatgcctgtttccacaagccagtccgcaatccagcccgtatttcccgacggcaggcggatttgaaaccaatccccgtctttttgaagaaccgtgtacgtgtcgttttcggctgctttgcctgtgatcgggtaggacaccccgggcccgctgcggatgtagacagccgcatgcgtcaccgtcccggcctcttccgccctcgcatggatcacgccgggtgcaatctgaaaaaagagtgccaggaaaaacagccggaaaaaaagttttttcacatctccacccctcatccctgtctggaaaattatgcactatttgttattcgcgctccgtaaaaaaactccttttttcgggtaagaaaaaataaaaaagggaaaaatagaaaagatggaacgagaaggagtgaacggcattgagagcagcggataaaaatatgacagcaggtaatgtatttaatcaagtttacggcgtcaatttccaggatccgggaattgccggacaggaaatgttcaacgctgaatcagcaatcgaacccggcctttcaaaaggggacgtgaaacttttaaaaaagaagctggggcgctcataatgaaaaatccgatccgaaaaaaaagggcattttcaggcgctgaacgcaaaccggggaaaaactttgccggcagccttgacaacagccggtgccacgcgtaacataataaaaatagatggtaaaattggcaaaaccgatgacaaagaagagtaattaagatccgtgtgaaaagagaggaaatgtcccgggctgaaaacatttctgcgcaacggcttaatgaacgaacactttgtaggttctgtcctgaacggaaatccagtagggacgggcgttacaggcgttaactgtaaaagtggaagcagacgcttcaattagggtggcaccacgggaatttaactctcgtcccttgtttacaagacaagggaccgggggttttttattttacataaacattggctgagaaggaggatactcgtcttcatattcatttttttagacatgcaggataaaaatggaaccccatcatttttcagcaatagaaggaggagtacgccatgaccgttcaaattccgcgcggcacgcaggacatcctgcccggcgaggtggaaaaatggaattatattgagaacaccgcaaaaaaaatatgtgaaaactatcagtaccgggaaatacggacaccgattttcgaatataccgagcttttccaaaaaggggtcggggacacgacggatatcgtccaaaaagaaatgtacacattcaatgacaggggcgggcgcagcctgacactgcggccggagggcacagcgcctgtcgtccgttcttttatcgggcataaaatgttcggaaacgcggtccagccggtcaaattgtattacaacggcccgatgttccgttatgaacggccgcaagcagggcgcttccgccagtttgtccagttcggcgttgaagcgctcggaagcgaagacccggccatcgatgccgaagtcatttcgctcgcaatggacatttacaaacagcttggtttaaaaaatgtcaaacttgtgatcaacagcctcggcgataaagaaagccggctcaggcaccgtgaagcgctgattgatcatttcaaaccgcatatcggggagttttgcgcggactgccaaaaacgtcttgaacaaaacccgctgcgcattcttgactgcaaaaaagaccatgaccatccgctcatgaaaacagcaccgtctattttggattatttaaacgatgcgtcaaaagcctattttgataaagttttgcagtttctcgcaacgctcggcatcccttatgaaattgaccccgggcttgtgcgcggcctcgattactatgtgcatacgtgctttgaaatcatgagcaatgcggaaggattcggcgcgatcaccaccctttgcggcggcgggcgttacaacggcctcgtgcaggaaatgggcgggccggaaacaccggggatcgggtttgccctaagcattgaacggctgcttgcggcactggacgcggaaggcatcgaacttcctgccggccacaggacggactgctatgttgtcgcgatcggcgaggagacgaaaccggctgcttttaaattgctccaggcattaagaagggccggattctcggccgaccaggattatttgggccgcaaagtgaaagcacagtttaaagcggcggaccgggtgaaagccgcgtttgttgcggtcatcggcgaagcggagctgcaggccgggaaagcaagcgtcagaaatatggcgacaggcgaacaaaaagaactgccacttgaagggtttattacagcctttaaagatatggcaaacaggggggaagcatgatggaaggacgttcttactattgcggtgatgtaacggaacaacaaattggcgaaaaagtggtgctgaaaggatgggtacagagaaggcgcgacttgggcggcctcatttttatcgatttgcgcgaccgcgccggcatcgtccaaattgtatttaatacagcggtctctgaagaagcttttaaacttgcggaaaaagtcaggaacgagtatgtgctcgaagtagagggaaaagtcgtcgcccgttccgaaaatacggtaaatccgaacttaaaaacgggcaaaattgaaattcaggccgaccgccttgcgatcatcaacaatgcaaaaaccccgccgtttatgattgaaaacgagacggatgtggcggaagacgtgcgcctgaaataccgttacctcgacttgcggcgccctgtcatgtttgaaaccatgaaaatgcgccatgcgattacaaagtcgatcagaggctttctcgatgaagaagggtttatcgaagtagaaaccccggttttaacaaaaagcaccccggaaggcgcccgtgattatctcgtgccgagccgagtgcaccctggcgaattttacgccttgccgcagtcgccgcaattgtttaagcagcttttgatgatatccggttttgaccgctattaccagattgcccgctgtttccgtgatgaagacttgcgtgcagacaggcagccggaatttacgcaaattgatattgaaacaagtttcatgagccaggaagacattttggccatgacggaaagaatgatcaaacggctgatgaaagaagtgaaaaatgttgacatcgaaacgccgctgccaaggctgacctacgaagaagcaatgaaccggtacggatcggataaaccggatacccgcttcggcatggaactggttgatgtatccgaaatcgtcaaaaacgccggttttaaagtatttgcgtctgccgtcacctcgggcgggcaggtaaaagcgatcaatgcaaaaggggcggcaagcaaatattcgagaaaagacatcgacgcgctcggcgaatttgccgcacgttacggcgcgaaaggccttgcctggttgaaagcggaaaacgaagggctaaagggaccggtcgcaaaatttttcacagaagcggaacaatcgcaaatagcggccgcgacgaatgcagaaacgggcgatttgctgctgtttgtggcagataaaaaatcagtcgttgccgatgcgctcggggcgctgaggaacaagctcggcaaagaactcggcctgattgacgagtcgaaattcaacttcctgtgggtgacggactggccgcttttggaatatgacgaagaagcagggcgttatacggcggcacaccatccgttcacaatgccgtttgaagaagatattgagaagctggaaaccgatccggcaagcgtaaaggcgcaggcctatgatattgtattgaacggatatgaactcggcggcggatcgctccggatttataaacgggatatccaggaaaaaatgttcaaggcgctcggcttttcaaaagagcaggcacagtcccagttcggctttttgctcgatgcgtttgattacggcacgccgccgcacgggggcatcgcactcggccttgaccggattgtcatgctccttgccggccgcagcaacctgcgcgacacgattgcatttccgaagacagccagcgccagctgcctgctgacggatgcaccgggcgcggtcagcgaggcgcagctggatgaactgcaattgaaattaaacgcaaaaaaatgatgtaaaaacccggaaaaaagggcatgaaatttttccagccacttggcgaaaaaacgcgcccgctgccgctatcccgtacggacgggaaaaatgcgggccgcccgcgggccttttttcgtttgaaaacgggtgaaaaaaatgctatgatataaacaagttgaatgagtcctggggtgttcgtatatgttcctatcgttttgaccgaacacttcattatcgggagtccggagtcgccagacggcgtgcatgccctttgcggggacgcataaagcctggtgcagggcacccacctgctcgagagcgggatcaaaacagaggattgcaagaacggcacgtccggggctcattccactcttttccctcttttagaaaaagagggttttttattttttggaaaagaaggaatttttgtgtgtttctcgttttttgatcgcgcaaaccgtttccttggcaaaatgatgccgatttttatcccgggaagcttaatcatcgggatggtgctcgggcaccggctgacgggccttttatttttagtgccgtggctgtttgcttttatgacttttacggggagcatcggctcaacctttaagcagctcggggcggttgtccgccatccatttccggttttgcttgctttaggggtgttgcatctttttatgcccctgtttgcttacggaacggggcatttgcttttttccgggcacccgctgacgacaaccgggtttttgctttcggctgccattccgaccggtgtgacaagttttgtatgggttatgatgcaaaaagggaatattccgcttgttctaaccgtcattttgatcgataccctgctgtcgccggttgttgtgccgcttactttgctcttgtttgtcggcaagagtgtacatattgaggtttggccgctcatgcaggacctttttacgatgatcgtcatcccgtctttgctcggcatcctgttcagccagtttacacagcttgaaacccagcggaaggccgcttcagtgctttccccgttttccaaaatcggcatgtttcttgtcgtcatgatcaacggcggggtcgtatcgccgtacctcaggggaatggatgcccatgtgctgtttattattttgaccgtgctgtttatttcggcttccggctatttattaagctggctgatcggcgctttgttccatcttgaccgcagcatgatcgtgacattgacatacagcggcggcatgcgcaatatcagtgccggatctgtcatcgccgtcacctttttcccggcccaggttgtgctgcccgtcatctccggcatgctttttcagcaggtgctggcatcttttttcggaacgttgctttcgagcgtatacagggataaaaaaacggaaaagccggcggcaagcagctgaacataaagtattgctttccgggccgtttttggataatctagggaagaaatgagtatgtttggagatgagaaaattgctgcaccagttttcacggaatgaattggcgatcgggcaggaagggctgcaaaagctgaaaaacagcaccgttgctgttctcggggtcggcggcgtgggctcgtttgcggttgaagctctggcccggtcggcaatcggaaggttaatcctggttgacaaagatgatgttgacattacaaatattaaccgccagattccggcgctgctttccaccgtcgggcaggcgaaagccgatttgatgaaaaaacggattgccgatatcaatccggattgtgacgtgatttctttaaaaatgttctatacggaagaaacggctgaacagtttttctcttacaagccggattatgtggtggatgcgagtgatacgataatttacaaagtgcatgtaatgaaagaatgcctgaaacggaagatcaaaattatatccagcatgggggcggccaataaaatggacccgacgcgcctccgcatcgcagacatttccgaaacgcacaccgatccgattgcccgcgttgtgcgcctgaagctgcgaaaagaaggcatcaaaaaaggcattccggtcgtgttttccgacgaaagcccgatcgtcatccgcgaagatgtccgcaaagtggtcggaaatgaggaagccgaaatccgcaaagcgaaaatgccgccatcatccaatgcgtttgttccgtccaccgcagggctgtttatggccagtttcgttgtccgtgacattttgaaagacatcccggtaaaaagggtaaaagatgaacattgaaaaaagaaagcatcccagatgctttcttttttttacggctgacggttccactcaattttttcatatacttgggcgagtgcctgctcaaatttgcccgtttttttcgggtcataatagcgggcaaattttagggtgtccggaagatattgctgtttgacccagccgttttcaaaatcatgcgggtatttgtaaccgatgccccgccccagccgttttgcgcttttataatgggcgtctttcagatgggcgggcacttcgccgctttttccggcacggatgtcggaaagggcggcatcaattgccatcatcgcggaattcgatttcggcgacaggcataattcgatgaccgcggctgcaagcgggatgcgcgcttccggaaagccgagcctttctgccgcttcgatggcggcaagggtgcgcgcgccggcctgcgggcttgcaaggccgatgtcttcgtaagcaatcacaaggagcctgcgcgcaatgctcggcagatccccggcttcgatcagccggcccaaataatggagggcggcattggcatcgctgccgcggatcgatttttgaaaagcactcagcacgtcatagtgcgcgtcgccgtccttatcatgggcaaggcttttcttctgcaggcattcttcggcaatgtcaagtgtaatgtggatcacgccgtcattgtccggttcgcttgaaatgacggccagttccagcgcatttaacgcgctgcgcacatcgccgttcgagccttgcgcaaaatggttaaaagccgcttcctctattttcactttgtatttgccaaggcccctgtccgcatcatcaagagcacgggcaagcgccgtcttgatctcatcaagcgataaagggaaaagctcaaaaatctggcagcggcttcggatcgccgggttaatggcatggtacgggttgctcgttgtggccccgatcaggacgatcatgccggactcaagatacggcagcaaaaaatcctgttttgctttgtcgagccggtggacttcatcgagaagcaaaatgactttgccgctcatttttgcttcggcagcgacaatctccatatcttttttattgttcgtcacggcatttaatgtacggaatgcatattttgtgcttcccgcaatggcactggcaatcgacgttttcccaacacccggcggcccgtacaaaatcatggaagaaagctggcgagcttttaccatccggtatatgattttatttttgccgacgagatgcccctgcccgatcacttcatcaatcgtgcgcggccgcatccggtaggcaagcggttcgtctttcattttaatcgctccaaacctgttttcgtatccttatcttatcagatttcacgggcatgcggaaagcaatcagttttcccgggcacgggttttaaaggggaataggaatgatggggctttttatatttttcggttgatcccggctcagctctgaggagtaaaaatttactcttcagaactgatcccggctgtacattgttgcttttttgatataatgatggtaagactggaaataggcgacgtggacggcctcggagaaaatgccggctgtgcatggtttttgtatgatttgacataggaaggtgaacgcggtgaaactgaaaaataaagtggctgtcattacaggcggcgcttccggaatcggggaagcaacggcctggctttttgcaaacgaaggtgcgaagattgtcatcggggatgtagcggaatccaagatggaaattgccgataaaatcaaagaaaccgggggagaagccctttttgtccattgtgatgtttccgataaatacagtgtcaaacatttgatggagaaggcgacagatacttacgggaagcttgacattctggttgcgtgtgccggaattccggaaaagcacgggcctgtccatgaactcgaccaggattactggcaaaaagttttggacattaacttaaccggtgtgatgctctccaataaatatgcgatcccgtatatgctgaaaaatggaaaaggcgcgattgtcaacatgggctcttttatggcccatgtcggaattaccaacagtgcggcctattccgccgccaaagccgcagttgtgaatttgacgcgggcggaagctgtcacgtatgccaaacagggcatccgtgtcaacagtgtctcccctggcacgacagaatccccggcgctgaaatatttcacaaaagaacaaattcaggaaaccattgaccacaatccgatgggcaggctcggtaagccggaagaagtggcgaaagccgtcttgttccttgtaagcgatgacgcatcgtttattaccggcacggaccttcatgtggacgggggctatacggcacaataaaaaacaccatccggggaaaaccggatggtgtttttttggatgaaaccggttttttgaaagaaccgggccccttcgagacgtctttatccataccgattgtcgcccgccgatatttatcccccgcctgcccggtgggagataaggaaatccgataaacagggcctgccgacagatggggaagataagcaaacagggccggtgccctaagccgcaggccggccgcgtatgtgtaaaattttactcgaaggggcagatgagtggaaaaaaatgggaagacactctactatctaattgtacactcaagatgaacatcnnnnnnnnnnnnnnnnnnnnnnnnnnnnnnnnnnnnnnnnnnnnnnnnnnnnnnnnnnnnnnnnnnnnnnnnnnnnnnnnnnnnnnnnnnnnnnnnnnnnaaaaagagtgtcttggaatacccgatatttaaaccttgtcgagaaaaacttgacacatacgccggccgctcttgtttcgcattatgccgataaatatgctataatatgttaagtttgggaccagtctgttcgttcatttatatgaatgggcttctttttttacgcgctcatctgccgtttttggcttaacaatttttttcgggaataatcggaaagaggtggaatgaaatgaaaatctcaacgaagggccgctacgggctgaccattatgattgaactggctaagcggtacggcaaggggccgacttccctgaaatccatcgcccagagccagaatttgtctgaacattatctggagcagctgatttccccgctccgcaatgccgggtttgtcaaaagcatccgcggcgcttacggcggctatgttttaacgcaaaaaccttcgcaaatcacagccggtgatgtgatccgcgtgctggagggcccgattacgccggtagagggcattgaagacgaagaaccggtgaaacgccagctctggatccggatccgggacgcggtcaaggacgttcttgacagcacaaccatcgaagatctggccaaataccgggaagatacagaaccggatgcctacatgtattatatttaaattgatatggggtgcgaaaagtggagaaaatttatttggaccatgcggccacttcccctgtccttccgcaagttgcagaaaaaatgatgcaagtgcttaccggccatttcgggaatccgtcgagcattcatgcattcggcagggaagcgcgccgcattttggacgaagcgcgccaggtgattgcagacagcatcggcgcgcagtttaatgaaatcatttttacaagcggcggaaccgaagccgataattacgcgattctcggtacggcagaagcagccgctgaaaagggaaaacatattatttccacggaaatcgagcatcacgctgttttgcatccgctggaatatttggaaacaaaagggtacgacgtcacgtatttacagccggatgaaacagggcggattaaggcggaagacgtgcaaaaagcgctccggaatgataccattcttgtcagcgtgatgtatgggaataatgaagtcggatcgatccagccaattgccgaaatcggcgggctgctgaaaaaccatccggccgttttccatacggacgccgtccaggcttacggaaatgtgaagctcgacgtaaatgccctgaacgtggacatgctttccgtttcggcccataaaattggcgggccaaaagggatcggatttttatacgttcggaacggaacaaaattgaaaaaccgcaacttcggcggcgcacaggaattaaaacgccgcccggggacggaaaatacggcgtccattgccggttttgccgaggccgtcaaatgggcgcagcaggcgcttgctgataaaccaaagcaatacggcacttttaaacaaagatttatggaaattttaaagcaggaaaaggtggaatttcagctgaacggcaacgcggaggcggcacttccgcatgtgctcaacttaagttttccgaaaacggacgtggaatcgctgcttgtcaatctggaccttgccgggattgcggcttcaagcggctctgcctgcacagccgggtcgattgagccatcccatgtccttgttgccatgttcgggcgcgattcggaacggctccgcacctccatccgtttcagtttcgggattgccaatacgatggagcaagtggaagcggccgcccgcaaaacggcagaaattgtccgcaagttccagcaacaatagaaaagaggaggcattatgcaaaaagcaccagaagatacaagagtggttgttggcatgtcgggcggcgttgactcttctgtggccgcctatttgctcaaacagcagggctatgacgtgatcggcatttttatgaaaaactgggatgataccgatgaaaacggcgtctgcacggcaacggaagactacaatgacgtcatccgcgtctgcaaccagattggcattccgtactatgccgttaattttgaaaaacagtattgggataaagtgttcacatatttccttgatgagtaccgcgcgggaaggacgccgaacccggatgtgatgtgcaataaggaaatcaagttcaaggcttttcttgaacatgctttaaacctcggtgccgattatcttgcgaccggccattacgcacgcgtggcttaccgggacggcgaatataaaatgctgcgtggcgcggatggaaataaagaccagacgtatttcctcaatcagctcgggcagcaccagctttcgcgcgtgatgttcccgatcggggagctcgaaaaaccgcgcgtccgcgaaattgcgaaagaagccgggcttgccacggcaaataaaaaagactcgaccggcatctgctttatcggcgaacgcaatttcaaagaatttttaagccattatctgcctgcgcaaaaagggctgatgaaaacgcttgacggaaaagtgatgggcgaacacgaaggcttgatgtactatacgatcggccagcgccacggcctcgggatcggcggttccggcgagccatggtttgctgtcggcaaagacctgaaagaaaatgtcctttatgtggaacagggatttcatcatccggccctctactccgattatatgaccggcgtgaaagcaaactgggtatcgggccggaagccgcctgaagaattcaggtgcaccgcgaagttccgctaccgccagccggaccagaaagtaacggtccaattgcttggcgatgatgaagtcaaagtcatttacgatgaaccggtccgcgccgtcacccccggccaggctgtcgttttttacaacggcgaagaatgcctcggcggtgccacgatcgataaaatttataaaaacgaagaacagctcatgtatgtcggctgatcttgcaggagccatgcacacgattgatgtgtgcatggctttatttatgggcaaacaggtcaccgctctaaacctttggccaggggaaactgactcccggatgaacatggaaacggaaagtccggcatgatcgcggcacaggcttttgcaccaagcaggaaaagggctgttctcctttatacagcccgaaaagacgaccgcctcgcgcgctgatgtaaaaagcgcctcgcccttcatatagcctgagaagtccatcatccgggccgggcgcgggaggtgcaaaagcaagccctcacaaaatgccggggttcgttaaaaaagtgaagggattcattttatgttataatactcgtatcatcaatcaggagtgtacgaaatgaacaagcatgaacgcggtatgaaggccttgcaagataaaaaatatgatgaagcgctgaaatggtttaatgaagcgatcgaagataatccggacgacccggtcggctatatccatttcggcgatgtgctgcttgctgcaggcgagcgggaaaaagcgcagaatttttaccggaaagcgctggaattgaaagaacttcccgcccccttttacagccttggcacaatccaatacgaagaggggcactatgaagcggctgccggctgttttgaaaaagcaatccggctcgggcttaaggacaaagatacgtattttatgctcggcatgtgttttatgatgctcggcaatccgcgctttgccatgccgtatttgcaaaggagcgtcgaactgggcgaaggggatacggaagcgaggttccagtatgcgctctccctcgtcaaatccaatttcgcggatgaagcgctggaacaatttcaaaaagtgctggaacaggacccaaaacatacggatgctttatacaatgcaggcgcgatttatatgcaattccttggcgacctggagaaagcggcccgttatttcaaaaaagcggtggagattcagccgggccatctgctttcgggatacggcttgaaaatggttgaaaaactgaaagacattgaaacgctgtaaggtgatgaaattggaaaaacagcatgcgatggatttattccaggaccaggaaaattttataaaaggaaagcatctcgcgaccattttccataacgagcaaaatttgtattccgtcatccgtgtgcgggttgaagagaccaataccgggatggaagaaaaggaaacggtcattaccggctattttccgcgcatccatgagcaggaaacgtacaccttttttggaaaaatgcaggaacacccgaaattcggcccccaattccaggcaaaccgctttcagaaggacattcccaatacaaagcagggtgttgttgagtatctttccagtgatttattcaacggcatcggcaaaaaaacggcggagcggatcgttggcgtgctcggtgaaaatgcgatcagcaaaatattggaaaatcccgccgcccttgacgaagtaccaaaactggcgacggaaaaagcacagctgatccatgatacgttggttgaacaccaggggcttgaacgtgtcatgatcgggcttgcgcaatacggtttcggtccgcagattgcgatgcgcatttaccaggtttacgaggatgaggcgctcgaaatgatcgcacaaaatccgtaccggctcgtcgatgatatcaaaggcatcggtttcgggcgggccgatgaactcggccggcagctcggcatcagcgggacgcatccgcaccgcatccaggccggctgctgttacatgctggaaatggaaagcatgcagcatggccatgtgtacgtcctgaaagaagaacttgcgcaggatgtcaaagcccttttggaagagtaccagaatgttgaaatcccggtcggcctgattgaaaatgagctggtaaaactgcaggaagagagcaaagtgatcatggaagaagacaaagtctatcttccgtccctctatttttcggaaaaaggaatcgtttccaatattgagcggataatgtcgcaaaccgagtatgcggaacagttcccggagtcggaattcctgcttgccctgggcagccttgaagaacggctcggcgtcgagtatgccccgtcgcaaaaggaagccatccaaaaagcgctgatgagcccgatgatgattttaacgggcggacccggcactgggaaaacaacggtcattaaagggattgtggaactgtacggcgaattgcacggcgtttcgcttgacccgcaaacctataaaaaagatgaggcatttccgattgtcctcgcggcgccgacagggagggccgcgaaaagaatggcggagtcaaccggtctgccggcaatgacaatccaccgcctgctcggcatgaccggcatggaggacctagacgattcagaggaccggcaggtagaaggcaagttcgtcattattgatgaaatgtcgatggtcgatacatggcttgcaaaccagctgttaaaggcgctgccggatgaaatccaggtcattatggtcggagatgaagaccagctgccgtccgtcggtccgggccaggtgctgaaagatttattgaaatcgggtgccatcccggttgtcaggctgacagacatatacaggcagaaagatggttcttcgattattgaactggcccaccatgtcaaaaatgggcgtattccggaaaatatttttcaaatgcaggcagaccgttcgtttatccgctgttcttccggccaggtggcggaagcggtggaaaaagtggtgaaaagcgcgaaacggaaaggctatacggcaaaagacattcaggtgctggcgccgatgtacagagggccggccggcattgaccgtctgaacagcctgttgcaaaatatttttaatccgaatgagaacggcgcccgcaaagagctgaagcacggggacgcggtttaccggatcggcgataaggtgctgcagcttgtcaaccagccggaacacggagtgtataacggcgatatcggcgagattgtctccctttttaccgcaaaagaaaatacggaaaaacaagatatgctcatcgtttcttttgacgggattgaagtgacgtatacgaagcctgatttcaaccagattacgcttgcgtattgctgttcgatccataaatcgcaaggaagcgagttcccggtagtgattttgccggttgtccgcagctattaccggatgctgcgccgaaacttgctgtatactgcgatcacaagaagcaaaaaaattttaattctgcttggcgaagaaccggctttccggatgggtgtggaaagggaagatgaccaaaaacggaagacgacactgtgtgaaaaactggctgaagcattaaaaacggaacaaatagaggcagggacggagacactcctgtccctgacagaagaaaattgggaccaggtcgacccgatgattggcatggagggcattaccccgtacactttcgcggaagaaaagcaaacggctccccaagcggattaagcaaatcaaaaagcagcgggggcggccgctgctttttgatttggctcaggaatcaagctttctggcaggccgggcctggctgatttggacatttttatccccggcgtatcctttattatttttaaacttaaagatagatatagcagttcatgtggcatttaaaacatccaggcaagcccttattgctgtttctttcccgtttctgggcggatttcctctgctgtttccgtaccataccggaggcttgatgctttgctccgccgcgggacccctttttgtagcacatagtcggccagatattggtgataaaaatattcgaatacgctgatgacgacggcagcaccgagcgaaaccggaagccccggcaaattgttgtgggcgaaaaaccgggccatcccccagatgacagaaaatgcaagcccgaagtctgagatcagcacaaaccaatccgctgtgcgcggaagaaggccgagatcagccaaaaaataagaaatgacgccaagaagcagtgctgtaaacagcacaccgaaaaaagacatgccgtaaatgaggccgagcaccaaatacaacaaaataaaatgcccggcgattttaatcaaaagcggtttaatgttttgcatacatgtcacttcctgttgttggttttctatattttttccggaatgggcgatcatacgctgggaaccgttcccttgcatgccgcccttccgccccggcaaacgatacatgccggtttgacgtatgctttttggaaaaattgggcatattggtaagcaaaaatggcgcttgaaagcgaggtgcttaccatgcaatgcccgaattgccggggcaaggacatcggaaaaatcggcgtgaaccagtattactgctggaactgttttattgaactgtcgattgcaaaaaatacgatccatacccatcaggtggaagaagacggcacattgagctctttggatgatttgtttgaggaagaagcgcgcaaactgagctgatggagggaatggggaaaatgaacaaaatgctgatggctgcggccggttttggtgcggggattgccgccgcccaaatggcgaagaatggcttcgcggacaggcggcagatgcggaatatggcaaagcgggtgcgcaaggcattccgttaaatctgcatacccggtaaaaaccccggccccgtttccctggccagacgccagcggccgaaatggaacgcacggatgcatcatgccaaatggcgaatacccctgttcgccggcagctcgttcataaggtgtatgcgccctccgtatttcagttgtcccaaaggttgctgcattggatcggtgataaaaatcctcataaacttccctctttcgcaaacacttgaaggagggaggtttttttatgcaacggtttcgcggtacatggctgtataaattattttggctgttattcatcctggttattttatatgtgttgcttttgctcaagcctttttgggcgcccgtattgcacgtcgcattggcggtatgcctgccgcttttgatcggcggctttatcgcttacatcctccatccgcttgttgaatttctttataaaaacgggctgccgagagggcttgccatcctgatcatctatattttgttttttggcggcaccgcttacgggatttacagagggctgccgcttgtgatcgcccaaatgaacgatctgtcggaacatctgccgcagtttgccgaccagtacagggacggcgttgtttacttgcaaacatcgatgaagcactggccggacgggcttcaggaccagattgacgagcgcattgaacgctttgaattatggctctctgcaaatgtttcaaattcaatcaacatgctgatgcaactcgtcaattacgccattgcgcttgccgtcattccatttatttctttttatcttctgaaagattttgaacatgtcaaaaaagcggccctggcattgacgccggaaaaatggcggccgtccgcagcagaatttattcgcgatgtcgaccggtcgatcggcggctatctccgcggccagcttttggactgcctgttgatcggctttctttcttttgtcgcatttgccatccttggcatgaaatacccgattttactcggcatcatcatcggggtcaccaatgtcattccgtatttcggcccggctttgggcgccattcccgtttcggttatcgcggcgaccatctcattaaaatttgtcctttatgtcgtcatcattgtgttcgtcctgcaatttattgaaagcaatatcctttccccttttattgtcggaaaatctttgcatcttcacccgctctttattattatcgcattgatcgcgggtgaggaaatcgcggggatcgcagggctgattctcgctgtgccggcgcttgccgtgctgaaagtggcaatcatccatgcccgcaagcatctgcacttttcaggccgcacgaatcaagttgacaaaccggagtaaacttttttataatttacccatgaacatacgtgtcctgtgggcaaaacgggcttttcggacagggatttgtccggctggcttagaaattgcgcggcacaggccgttcctattgacagaactgcatatcaaaaaacgaagaaagatcgagtatgttatcgcccattttaaaccgtgatgcacggcccagagaggaatttccgcggctgaaagaaattccaaaatgaaggataacagaacgctaatccggagtgcagccaaaccctgccgttttgccccgttaccggcacccaaagagaaaggcgttttttgcctttaatcagggtggtaccgcgagcaagcctctcgtccctgtccgggatgggggcttttttgcgtccaggggttccggttttcataaatcacagaggaggttttctcatgaaaaaaagatcaagtgcggaaatccgcagcatgtttttggacttttttaaggaaaaagggcataaagtcgagccgagcgcttcgctgatcccggtcaatgacccgtcgctgctttggattaacagcggtgtggccactttgaaaaaatatttcgacggaacgatcattccggaaaacccgcgcattgtcaacgcgcaaaaagcaatccggacaaacgatattgaaaatgtcggaaaaacggcgcgccaccatacattttttgaaatgctcggcaacttttcaatcggggattatttccgtgaagaagcgattgcctgggcatgggagctcctgacttccgacaaatggtttggcatgccaaaagaaaaattgtatgtcaccgtttatcccgatgacctggattcgattgcatgctggaaaaaagccggggtgtccccggatcatattatcccgcttgagggcaatttctgggaaatcggcgaagggccatccgggccggatacggaaattttcttcgaccgcggcgaaaaatacgacccggaacggttaggcatccggctccttcaggaagatattgaaaacgaccgctatattgaaatctggaatatcgtgctgtcccagtttaatgcgataccaggggttccgcgcagcgagtatccggagctgccgaagaaaaacattgataccgggatgggcctcgaacggatggcatgcgtgctgcaaggggtcgataccaactatgacagcgacctgttcatgccgattattgaagaggttgaaaaaatttccggcaaaaaataccgtgccggaaataaagaggcggatacggcatttaaagtgattgccgaccatatccgcaccgttgcttttgcggttgcggacggggcgctgccgtcaaacgaaggtcgcggctatgttttacgcaggcttttgcgccgggcggtccgctacgccattcagctcgatattcacggcgcttttatgtacaagcttgtgccaacggtcggccggataatgaattcctattatccggaagtggaaaaaaatgctgattttgtgcaaaaagtggtccgttccgaagaagaacgcttccaggaaacgctgaacgaagggctttccattttagaagaacgaatcagggcggcaaagaaaaacggcctggaacagctgccgggcgaagatattttcatgctttacgatacgtacggcttccctgttgaactgacagaagagtatgcgcacgaccaggggctccgtgccgaccatgaaggctttgaaaaagaaatggagcggcagcgggaacgcgcgcgcaacgcccgtcagcaggcagaatcgatgtccgtccagggcggcgtgctcggcaatattacagtggaaagcgaatttatcggttatgaccgccttgaggggacggcccatgtcgctgtgcttttaaaagacggcgacatcacagagtcggctgtaagcggagatgaaatccagttcattttggataaaactcctttttacgcggaaagcggcggccagattgccgataacggcactttgacagcagaagggctgaaagtagaggtcacaaatgtgcagaaagcaccgaacggccaaaatctgcatcagggcgttgtcgtatcgggcaccatcaaaaccggccaggaagtatttgcacaggtggacggggcaaaacgccgcgacacggaaaagaaccactccgccacccatctgttacaccaggcattgaaagatgtgctcggaattcatgttaaccaggccggatcgcttgtcgaaccggggcgcctccgttttgacttctcgcatttcgggcaggtgacagaagaagaactcgaaaaaattgaaacgattgtcaatgaaaaaatttgggcaagcctgccggttacaaccgatttgaaaaaactggacgaagcgaaagcaatgggagcgatggcgctgtttggcgaaaaatacggggagatcgtccgcgtcgttcaaatgggcggatacagcctggaactgtgcggcggatgccatgtttcaaacacggcccagatcggcctgttcaaaattgtctccgaatccgggatcggtgccggcacccggcggattgaagcggtgacgggaaaatatgcttacggattgatgcaggaacagctccaccttttaaaagaggcaagcgccaaattaaaagcaaaaccaacagaattgccgggccgtatcgacgccctccagcaggaattgaaagaagcacagcgtgaaaatgaatccctggctgcaaaactcgccaatatcgaagccggatcgcttgtggaccgcgtaaaagtagtagacggcataaatgtgctcgcggcgaaagtcgaagtcggcgacatgaaccaactgcgcaatatggcggacgatttaaaacaaaaactcggaagcgggattattgtcctcgctgcggcgacagacggaaaagccagcttcattgccggcgtcaccaaagaccttgtcgaaaaagggtaccatgccgggaagcttgtaaaagaagtggcatcgcgctgcggcggcggtggcggcggccgtccggacatggcgcaggccggtggcaaacagcctgaacaaattgatgccgcattacaaattgtagaagaatgggtaaaatccgtttgattcaagcaaaaagtagtgtacaatgaaacagtatgtgtaaaattttannnnnnnnnnnnnnnnnnnnnnnnnnnnnnnnnnnnnnnnnnnnnnnnnnnnnnnnnnnnnnnnnnnnnnnnnnnnnnnnnnnnnnnnnnnnnnnnnnnntaaaattttactcgaaggggcaaatgagtggaaaaaaatgggaagacactctatcatctaaatgtacaccttgaatgaacatctagagagaggtcttcccatggatattatatcaataattgctggattattaaagaatacaaagagtcttatggagtttgaagaacaggttaaaattctgatgcagaaggtttttacacaatgggttggggatgtatttgaggagttagataaaacaataaaacagaagaagttggaggaaggctgggagtactgccggagtgataacagaagcgttcagtttctatttggaagtgtgacttttaaacgatcattaatgcgtgataagagagggaactcacattatcctttggatgaatgcttggggctgttaccccaccagagatatagcccgttagtggaattaaaggtggcagagttggcaagtgagaacacctatcgggaggcggctaatattttaaaagaatggacagccgtgagtcttagtcatacaactgtaggggaaatggtgaaacgcgtagggaaaacgcaggcggaagccgacaaggcccttgtagaagagatggaaatagctgcttcactgcctgatgggaagaaggtagactacctgttttccgaagcagatggcgtattcatccggggactggaaaagaaacagggtatggaagtccaccatgccattctctatgaaggttgggaaaccaatggaaaaagggtctccctgcgtcagcccacagtcatcatgacgacggaagacattcagacattttgggatgaagtccaagccacagctgccaacacctattccctcgaaaaagcgcatgtcattacaaacagtgatggaggtgctgggtacacagctgaacggtttcaaacagcattctcacagtcggaattcccggtgctcaaccagctggatacctaccacgttgcacaagccattgtaaggacatttgggggcggaaagagcgagatcaaggagcagattagaaaagcgattagaaagcatgacctagaccaattcacgttatatttggatacgcacgaaagcaccttgacggataaaaaggccctcaagaaaatcaaggaattaaaaacttgacacatacaatgaaacaaagctggttgtttacacggatcgttttcaggcagaaagcggaaaatgcaccttcaaaatttgtgtaaaccggaacatctaaaaagccaagctttagtagagaggtgctgcgataatgagctcattcgatgaaacgatgagatttaattttccggaagaaccgacggaacacgaggtcaaggaagttttgctccatgtatacagcgcgctcgaggaaaagggctataatccgattaaccagattgtcggatacctcctctcgggcgacccggcttatatcccgcgccatcaggatgcccggaatatgattcgcaaactggagcgggatgaaattatcgaagaactggtcaaatcgtatttgaaacaacatcgtgggggattaaattgaaaattatgggccttgatgtcggttcgaaaaccgtcggtgtggcggtcagcgatgccctgggctggactgcccaaggcatcgaaacgattgccatcaatgaagcaaagggcaatttcggtttcgacagggtcgctgagctcgcacaaatccacggcgtcgaaaaaattgtcgtcggtttcccgaaaaatatgaacaacacgatcggcccgcgggcagaggcctcaaaggtttatgctgaagaattaaaaaaacggctcaatctgcccgttattttatgggacgaacgtttaagcacggcgcaggcggaaagaatattactggaagccgatgtcagccgtaaaaaaagaaaaaaagtaatcgataaaatggcggcaagtgtaattttgcaaggattccttgacagccaaacttaatggggtgaagaaatgacacataaccatgaacatgaccacgaagaccaccagcatattaccgtagtggacgaagacggaaacgaacaattgtatgaagtgctttttacgtttgaatccgaagatttcggaaaatcgtacgttctgtactatccgattggcgcggaagaagacgaagatgaaagcattgaaatccatgcttccgcctatgtggaaaatgaagacggcacagaaggggacctccagccgattgaaaccgatgaagagtgggaaatgatcgaggaaatgctgaatacgtttctcgatgaagaagaagcataaacggttctttaacatgcacacgggacaaaccgtgtgcattttccgtctgccggaatggatattcccttttgaaaagaaaatgaaataaaacttggcgaaatttgtagtataatggacaggaaaaaagccgaaaatggctttctgtacttgttttaagatttttcttattgagaggaagattctgttttggccggaaaggaaaatccgtttcaaatgttgcttcaaaaaatgaagcagaaaccgaaattatggatagccgcatgcattatcatgctggctgttgttgttttcggaggggcagcctttttttacgtgtcggcgctgaaaccggcggagcccggcaaccataagacaaaactcgtcacgattccgcccggctccggggtaaaggagatcgggcatattttgcaaaaaaacgggatcatccaaaatgcctgggcttttgcgatttatgcgaaatcccaccgccagtccggtttaaaggcaggcacttatcaaatgtcaccgtccatggatacaagcacgatcgtccgcagcatgcaaaaaggcggtattgccgcaatccgctttaccgtgccggaaggggccggccttgaggaaattgcggagatcatcgaaaaacacagctccttccggaaagaagaggtgctcaagcgggcagatgaccccgcttttgtacagcatttgatgaaaaaatacccgcgccttgtgacaaaagaagttttcaatcagcagatccggcatccgctcgagggctacttttttccggcgacctattcgttttatgatcagcatgtgccgcttgatgccgtactggaaacgatggtggctaaaacaaatgcggttttttccgcttacgccgggcaaagcacacaggcccgtttaacgccacacaaactgcttacgatggcttcacttatcgaggaagaagcaactgaaaaagcggacagggcaaaaatttcaagcgtcttttacaacagattaaagaagaacatgccgctgcagacggacccgaccgtactgtatgctttaaaccggcataaagaaaaagtgacgtataaagatttgcgggtgaattccccttataacacatacaaacataaaggccttccgccaggcccgattgcaagtcccggagaacaatcgatcaaggctgcgctcaagcctgaaaaaaccgattacctctattttcttgcaaatgtggatacagggaaagtctattttgccaatacattgaaggaacataatgctttaaaggaaaagtacattgcgaaggcgaaacggtaaacattcgctttcccgtttgaaatgtgctacgataataagcggaatttttttgagaagcagggagaagttatggaaatgtgtttatgccggagggcctgccgatgaacggcccggtcgaagcgtatatagagcagttgatgcgaaagaatgatccgctatttgaagaaatggcgtcttttgcaaactcggagcatattccgattatggatccgatcggaatggaaacactctgccagatgttaagaatccagaagccggaaagcgtgcttgaaatcgggacggcaatcgggtattcggccctgaaaatggcagatgcgcttccgaatgtaaaagttgtcaccattgaacgcgaagaagaaagagttgcccaggcaaatgcgtattttgcccgcacccctttatcccggcggatccgcctgctcaaaggggatgcgctttgcggggacgtcatccaaaaggcccgggaactcggcccgtatgatgcgatatttattgatgcggcaaaggggcagtaccggaaattttttgattcatttacgccttttctgcgggaaaagggatgtgtatacacggataatgtgctatttaaaggccttgtggtacaagacttcatcgaaaagaagcaagtcagcaatctggtgcggaaaatcagaagctacaacgaatggttaatgcagcatgagcaatttatcaccgcgattttccccgttggagatggattggcagtcagtatgaagaggtgaaggaaatggaacgaaagccggctgtgatcggcgtggccgggggctccgggtccgggaagacaagcgttacccgggcgatttacgaaagcttgaagggacactccattctggtgcttgaacaggacttttactacaaagatcaaagccatctgccatttgaagaaaggctgaaaacaaattatgaccacccgtttgcatttgacaatgacctgttcattgagcatctgcataaactgctttcttatgaggcaattgaaaaaccggtttacgacttttccaaacatacgcggtcggaccgcaccattcatgtagaaccgaaagatgtcattattttggaaggcattttagtattggaagatgaaagattgcgcaacttaatggatattaagctgtatgttgataccgatgccgatttgcggatcatccggcggcttgaacgggacattgaagagcgcggcaggacgctccagtcggtcatcgagcagtatattacggtggtcaggccgatgcacaaccagttcatcgagccgacaaaaagatatgcagacgtcattatcccggaaggcgggcagaaccgggtggcgattgatttagtcgtgacaaaattgcaatccattcttgaacaaaagtcttttttgtaatacgattatttagaatacatggtgagcgcgccggaatcttttcggcgcgctaaacaacatgacggaaaaaacacagccgcttgcagaaagcgtcatcttgtatgttgaaacgcatacacatttgataactaagagatataggagtgaagggatttggctcaggaaaaagtttacccgatgacccaggacgggaaagaaaaattggaacaggaactggaatatttaaaaacggtcaaacggaaagaagtcgtcgaacggattaaaatcgcaagaagtttcggggatctttccgaaaattccgagtacgattccgcgaaagaagaacaggcttttgtggaaggccgcattacgacaattgaaaacatgatccgcaatgcgaaaattattgaagatgacgggacagatacggtatcgctcgggaaatccgttacttttgtggaactgccggacggggaagaagaaacgtacacgattgtcggaagcgccgaggccgatccgtttgaaggaaaaatttcaaacgactccccgattgcaaaaagcctgctcgggaaaagcgtcggagaggaagtcacggttcagacgccgggcggggatatgagagtcaaaatcatctcgattcaataatccggagcgagtgcgcaggtgttccaaagtgccgtgttgtaaagggcaccgcctgccgcatacgcttatcacatccggattgcggcgggccatgcccgccgctaacgcatttgtgcgccttttcgagccggcaaaaccgtggtatgataaggccaggaaatggagggatgaccttgcctgaattttacagccgtgaagaacggaaacaggccatgcagcagtcaaaacggcggaaaacaaacatcattttaaataccctgattgtgattgtcatcgcgcttatttgtatcgtggcttactccatttttttcgccgggaacgataacgcaaaaccggcaccgaaggaaaagaaagcggccgtaacaaagactgcttcgtccggccatgaaacgacatcatctcatacatccaaaaaaacggcgggcaaagacaacaaaaaatctacccgtaaagtggaaaagagcaatgaaccgaatgtgaaagaagtcattaccgattccagctggaaaccggtcggaaccggacaaacaggcgggcatgtctattccgcctcatccacttcgcttgactggaaggaaaagctgaaggcattgtcttatgcaacaggcataccggaagacaatatgacggtctggtttttggagcacggggcaacgaccgatgaggcgatcggaacggtttctgcgaaaaattccgatacgacctaccgtgtttatttgacatgggtggacggaaaaggctggaaaccgacaaagatgtatgaattgatcgagaacgataaaaaataagcggccgtctgtgccgcttatttttgtgccgcgaaatggaccacggcggaataatggggcctgccgtccgcggcaaactgcgtttggtgtgaaacggacgccacccggagcagcaaggttttattggcttcgatttgatcattgatttttttctcgagcgcctcaagccggtccgcttcgaaaaattcaatcttatcctctatcctgtcgagttcaaatgccattttcgctcacttccatgtacatcgtatcagacgttgtttttttggcaagctgtatccacttctgcttttttgctatataatggggattggaacttttggacgaaagagggagtcatatgaaaatcggaatcatcggcgcaatggaagaagaggtgtcgattttgcgcgggcagattgagcatccgcatgttgaaacgattgccggctatgaatatacggcgggaaaaatgaaagggaaagatgtcattttgctccgttccgggatcgggaaagtgaatgctgcgctttctaccggccttttgctgcaaacatacgcgccggattgcttaatcaataccggttcagcaggaggcgcaaaccccgcccttcacgttggcgatgtcgtcatttcaacggaagtgcgccaccacgatgttgacgcgacagtgttcggctatgaatacgggcaagtgccgcaaatgccgcccgcttttttggcggatgagaaactggtccggattgcggaaagctgcgcggggaaactgcctggacttcaggttacgaaagggctgattgctaccggggactcatttatggatgaccccgcaaaaacggcggctgtaaaggaacacttcccggaagtgcaggcggtggaaatggaagccgttgccgtcgcacaggtggcatggcaattcggcatcccgtttgtgatcatccgctccctttccgatattgcagggcaggagtccgggatctcttttgatgaatatttggaaacagcggccgtgaactctgcccatcttgtcacgggcattgttgaacatctgtagacccatttttttccttcctttcctgcaattacttgtcttttttatgtttcatctgtgatagagtaggtttagcagattgatagaaagggtgaggcggttgaagaaagcgaaatcgatgtacgtgaaaatggtggattttaaaatgtacggcatcgtgctgcttgctgtgacgggctttttatatttgggtgcggtgatgccgatcgaagggaaatccgaactggggacaaaaattttactcgttgcgtcaagcgggtttgttgccgtatctgttttgtttttctcgatttcacgcgcttaccataaacggcttttaaaaagcgaagaaggcgcacagcttttacagcggaataatcgcaaatcataatggaaaaggcaggggcctttgtaacccgggcggtgcagtaacaaagcacacggttgtccggcatacaaggttttcggcctttttttatttttttgccaatttgcggtttacaaacccgcctgaattggatatactttcctatgtaagcaaattcaaaagaggttggagaacatggcatacacaatcctattttcagcagttgcaactgaacatgttctgcatccgctccgtatcggtttgaatttgcgctgattttttaatttgacgcacaagccgcaggatgcatttgcctgatccgtgcggtttttttcggaaagccgcgggatcatgccggtcctgcggcttttttgtgccctgaaggaggtgaaaaaaatgacattaaatttaatctttattacggtcacgattaaacggctgaaaaagacagcagaacaaaggcagcgtgatgaagaagttttcaggctgtacgatgaaatgaatgcgaagcgtgaagcattccaagtaaggcatttttaagcaaaaaaacatcttgagaaaggagcggttgacgatggcccgttatcagagacgtttggactttatctttatggagacagattccacctagcaaaaccggatcaggggatggcgctatgtttttgcatattttgatttttaccgctgttttccacaggcggaaaaggaaaagctgatggctgcggccaccggcttttttggcattgattcattgaaaagcattctcaatagtggaatgggagagcgacagtctttgggcgcaaaaaatttcaattatctgccctgattttcaattacaagcgtgcaaaaaagaggcggaaacagcataaaaaacataaatatcatggttttatgactatatcatttaaaatccggaaacgataaaatagaaatccgggtgtaattgcttgacaagaaattaattccatataataattggtattggattaaaatgattattgtttgctggccgggccggcaaaccgtgatcattcacacaaatgattttaaggaggaattgcacgatgtcccttattggcaaaaaaattgaaccgttcaaagcacaagcataccgcaacggcgaatttgtcgaagtaacggatgaaaatttcaaaggaaaatggagcattgtctgcttctatcctgctgattttacatttgtctgccctactgaactggaagatctccaggaacattatgccgctttaaaagaactcggcgtggaagtctactcggtttcaacagactcccattttgtgcacaaagcatggcatgaccattctgaagcgatcagcaaaatcgaatacaccatgatcggcgacccgacacaaaaactcacccgcatgttcgatgtattgcgcgaagaagaaggcgttgccgacaggggcactttcctgatcgatccggacggcgtcatccagggggttgaaatcaacgctgacggcatcggccgcgacgcaagcatttggatcgacaaagtgaaagccgcacaatatgtacgccagcatccaggcgaagtatgcccggcaaaatggaaagaaacgggtgaaacactgaaaccaagccttgatcttgtaggcaaaatctgaggagatgaaccgaaatgatactggatgaagagattaaagcgcaactggcccagtatctgcaaatgatggagggcgacgttctgctgaaagtgagcgcgggttccgatgaaacatcgcggaatatgctcgaactggtcgaccaattggccgccatgtcgccccggataaaagtggaaaacacaaaactcgaaagaaccccgagtttcagtgtaaaccgtccgggagaagacaccgggattatattcgcgggcgtgccgctcgggcatgagtttacctcgctcgttttggccctgctgcaggtcagcggccgccctcctaaagtggatcagaaggtcattgaccagattcaaagcataaaaggcgaataccattttgaaacctatgtcagcttgacttgccagaactgtcctgttgtggtacaagccttgaacatcatgagtgtgctcagtccaaatattacgcacacgatgattgacggggctgcatttaaagaggaagcggaaggaaaaggcattatggccgtcccttccatttatctgaacggcgaattctttgaaagcggccggatggaagtggaagaaattcttgccaagcttggcagcacagcggatccgtccgagtttgaaaagaaagacccgtttgatgtgctcgtcatcggcggtggcccgtccggtgcaagtgcagccatttatgcggcacgcaaaggcatccggacagggattgtcactgaacgcattggcgggcaggtgctcgatacagtcggcattgaaaacctaatcggcacgaagtatacggaaggcccgcaacttgctgcaaaccttgaagagcatgtcaaacagtataatgttgatattatgaatctgcagcgtgcaaaacgggttgaaaagaaagatctcgttgaggtggaattggaaaacggggctgtattaaagagtaaaaccgtgatcatctccaccggtgcacgctggcgcaacatcaacgtgccgggcgaagcagaattcaaaaacaaaggtgtggcatactgcccgcactgtgacgggccgttgtttgccggtaaacatgttgccgtaatcggcgggggaaactccggcattgaagcggccattgaccttgctggtgtggtcaaacatgtaaccgtcattgaatttatgcctgaattaaaggcggaccgtgtgctgctcgagcgcctttacagccttccgaatgtgacggttataaaaaatgcgcaaacgaaagaaattaccggcacggataaagtgaacggaatcacatatattgaccgtgcaaccggggaagaacaccatattgaactcgagggcgtgtttgtccaaatcggccttgtcccgaataccgaatggcttggcgatacagtggaacggacaccgcggggtgaaattgtggtggataagcgcggcgcgaccagtgttccgggcgtgtttgccgcaggagactgcacagacagcgcttataagcaaatcattatttcgatggggtccggcgcgacagctgcgctcgccgcttttgattacatcatccgggaaacgaaaacggatgaagctgtacacaattaagggatctgtttaaccgcattacagcgcgctgtaatgcggttttttgattttttaaatgccgtgcaatatttaccagaccgtcttttcttcgggacagacacaattccgcctccttgttcatatgtttgaactatataggctcaagcctaatggaggtggaaggatgtcggggatcttaactgcagtaagctatatgatgaaagagcttgtttttttggtttcctatgtgaaaaacaatgcttttccacaacctctttcggcaagcgaagaacggaaatatttgaagcggatggcggaaggcgacgcggatgcccggaatattttaatcgaacataacctgcggcttgtagcgcatattgtcaaaaaatttgaaaataccggtgaagatacagaagatctcatctcgatcgggacgattggcctgatcaaggcaatcgaaagctactcggaagggaaagggacaaaacttgccacatatgcggccaggtgtatagaaaatgaaatacttatgcatttaagagctttaaagaaaacaaaaaaagatgtttcgctgcatgacccgatcggccaggataaggaaggaaatgaaatttcgttaattgatgtcctccagtctgaagcggaagacgtatttgacacgatccagctgaatatggagctggaaaaagtgaaacaattctttgacatattggatgaacgcgaaaaacaggtgatcatcggcagattcggcctgaatttagaaaaggaaaaaacgcagcgcgaaattgcgaaggagctcggcatttcaagaagctacgtatcccgtattgaaaagcgggccctcatgaaaatgttccacgaattttaccggcttgagaaagaaaaaagaaaggaacaaaacggcgaataatgaaaaaggcacattgcaaaatttgcagtgcgcctttttcatattttttttaacttaaacggcgccaccatcaggatcgataacagcaccatccagacgaacaaccagaagggggtgacataaggaacggcaaaaaaaccggctgttacacataagcctgccacggggatcggaagcccgtaaaaaaagcctttttgcttgctgatattaaaccgggcgagccggatcatcccgcaaagcatataaaacatggcgaccagcatacccggaatcccgtacaggcaaaacagcgctgtatggatcagcatggcaggcgcggcgccaaacgagagcaaatcgcaaagggaatcaagctgcttgccgagtgcggattctgtttttaaccttctggccagtttcccgtcatagcggtcgaacaatacagcggcaaaaatcaaggcagcggaaaccgccggctcgtgattgccgcaataaaaaagcgctgcagccccgcagcatccgtttgccactgtcaatccattggcggcttgcgatttgataaaattcaagatagcattataccaatgatcaaaatccacccccgcaaacctcccaactgcctttatttttatacatattcacaaaaataggatttatcacacaaaaaaagccacatatcaagcaaaagtggctaggaggttgctttgattttatgcgtcagcgaccggcgttcaatctctttttcaatgagcttaacaaactcggaacttaatttcagttcttttgctttaaaataggactcgatcaatagttcatcagataacttatacatttgtaccacctccgaaaatcatgttctttttttaaagcagcccgcgtatcataaagatagagtatttgtacccttactttatcaaatttagtcttgcggaacaagcgttcttttatccacagtaaaatgtttatatcttgtgggtaaattgtttataaacgcgcgaaggactggtgttactttgtgcaaaatgtgtataagaatatccacaacgaaggagaaatgtagaaatctgtcgaaaagtttttgcttttgaaggagcaaaagaaaaaagctgcacggtggcagccttttttcttttgccggtacacgaggaaaatctgtgttgtgcccggaagagatcctgcatggggcccggctataatcttgcattgccgcaagttttgtttatctgcttttacactttgttgtccggcgctagcccgcaaacataagtccctttctcaatctggatggtagcgtgctcgatcccgaatttgtcatgcagttctttttccagcttttccagcagctggtcgttgtcttcaatttgggaacggacaatatggaccgtcagtatcgtttctgtcgtgctcattccccatatatgcaaatcatggacgttgagcacggtcggaatttgttctaaataggttttaatcgcaccggcatcaacgcctgcaggcaccgcatcaagcgaaaggtcggccgcttcccgcaacaggccccatgtccctgcaaaaatcacaaccgcaatgatgatgcttgtaaccggatcgacccactcccagcctgtgaacaggataatcgcacctgcgatgacaacgccgagtgagacaagcgcatcggcagccatatgcaaaaaagcgccgcggatattgaggtcagtttttcgcccggacataaacagtaaagcggtgatggtattaataacgatcccgatcacggcaacgatcatgaccgttttgcctgcgacaggttccggatgggcaaaacgctggattgctccgagaaagatcgcgccgattgcaatcagcagaataatcgcatttaaaagcgcagccatcacggatgattttttatagccgtatgtgcgcttttttgttggcaattttttgccgagccagacagcggcccaggcaataatgagcccgagcacatcgctcagattgtggcctgcatccgccaacagcgaaagggaatcggaaaagaagccgtaaatggcttcaacggcaacaaaaagaatattcagcccgatgccggctgcgaaagcttttccgtattgtgccggctcatgatgatggtgttggtgtccatggtcgtgtgacattttattggctccttttacacatgctgtccaaaagccggaaaactggcttttggacggacatcagttgttaagttcattatatgcgtatctcaaaagtttgcaaagaaacttttacaagaaagtaaattttatgttcattttcgcccattcccggcttgacatgctacaataatacctataaagacagaaaggaagagaaggaatgccggaatatgaacatgttgaggaacatttccaggcatccgacaccgtccgtgatatcgtaattggcatgtcggacgggctgaccgtgccgtttgcactggcggcagggttatccggtgcagtggattcgccggtgctcgttctcgcggccggcgcggcagaaattgcggccggttccattgccatggggcttggcggttatctggcagcaaaatcggatgccgaacattattatagcgaattaaaaagggaataccgggaagtagaagaagtgccggaacgggaaaaagacgaagtccgggatgtatttaaggcatatgatctgaaaccggaacaaatcgaggcaatcgtcgataaaatggcagaaaaccctgataaatgggtggattttatgatgaaattcgagctggggcttgagaagccggaaaaggggcgcagcttaaaaagcgcgttaacgattgccctgtcatatattgtgggcgggctgatcccgctttccccgtacttttttgtcaccagggcatcacaggccctgcttgtttccgtcctggtgacgctcgttgtgctgtttattttcggggcggtgaaagggcggtttaccggttccaatgtgtggaagagcgggcttgagaccgttgtgattggcggtttggccgctgccgctgcatttgggctggcaaggcttttgacaaaataaacgaacccttaggcacggcacgggaactcttttcacgaaaaaagcagcgcagggggcaaatcccatgccgcaatggactggagggagctgtatgctatatatttgggtcggggttgccggtattttcggcgctttggcacgctattatttcggcatatggatcggcatgtacacgcatgccgtttttccatatccgacacttgcgatcaatctggccggctgctttctgcttggctggcttacgatgcatctttttaaatccaataagattcatccgtatattgtaaccgcgcttggcaccgggtttgtcggttccttcacaacattttcgactttcagcgtggagacggtgcagcttatccagcaatcgcatgcgtttgccgcgctgttatatgttttctgcagtttatccggcgggctgttcatgtcatggaccggctttaaactaggcgggatgctgcattcgcggctaaagggaagaggcggttcagatacagcgtcatgaaggaggcggattcatggttttaaacggcatttttatcgcaatcggcgcctttttcggggcggtttcccggttttctctttcgcggtggatcaaccgggcgtttccggcaaaattcccgctggccacatttttcattaacctttcgggctcatttatgctcggccttctgtttggcacaggtgccgggagttcgtggcgcctacttctcgggaccggctttttgggcgcctttacaactttctccacttttaaacttgagaatattcagctgcaggctgacaaaaaatatcatattcttgttccgtaccttgtgctgagctatctgttcggcattgccctggcatttttaggcatcctgctcgggaaatattttacctgaagcatgaaacttttgggcaggcattccgtatcttaatggtaggcggccggtacatactttcttttttttgccgggcctggcatttcaatgctgctggcagggtattggatttataagcataaaataaggaggattgtatatgaagaagtggatgccatggctgattgtggccgccatattggtggttctgatcgtcagcgtttttacaagttataacagcttggtgaatgcggaagaaaacgtaaatcaatcttattcgcaaattcaaaaccaactgcaaaggcggacggatctgatcccgaaccttgtgaataccgtcaagggttatgcttcccatgaaaaagcggtgatagatgacatctcgaaagcccgcgcacaattggccggggcaaaaacacccggagaccaggcagcggcaaacgaccgcctggatagcgcgttgggacggctgttggtggtggttgaaaaatatccagatttaaaagcaaaccagcattacacgcagctgatggatgaactcgccggcacggaaaatcgccttgctgtggcgcgccaggattacaatagcgccgtcgcaacgtataacaaaaaggtgaaaagaatgcccggcgcacttattgccggcctgttcggttttgagaaaaaggaatattttaaagcggatgaaagtgcaaagaaaaccccgaaagttgatttcgggaacagcagtgatcagtgatgaaaagggccgcgcttattacagccgtttttctcgcctttctgttggccgtatgcacggccgttcccggtgcgcgtgctgcagcgggcattccggaaccggccggggacatctatgtgcaggattttgccggggtgctgacagacagccagaaacaggaactcgtttcgctcggcaggcagctggatgagcaaacaaaagcgcaagtcgcggtattgactgtggacacgaccgggaaagacacaaacattgatgcttacgccaacaaagctttccgccagtacgggctcggcaataaaaccatgaacaacggagtattgctcgtagtggcagtaaaagacaggaaaattagaattgaagtcgggtacggcttggagggggcgcttccggacggaaaagtagggcggatccttgatcagtatgccataccgtatttgaaagaaaacaagccggatgcggcggttatcaatacgtataagaagcttgccgccgaaacggcgaaggaatacaatgtaaatcttcaggcccatccaaaggcgtatgagcggccctcttccgcccaggcttccccctattcgttctggaaacagattttgatcgggcttgggatccttatcctgattttcattgatttcaagtttctcggcggaaccatgacgtattttctgctgaatatcctgatgatgttctttcgcggcggcggtggcggcggaagcggcggcgggggaggcagcaaaggcggcggcggttcttccggaggcggcggcgcaagccggggatggtaacgccaaacacggcgcaaggttccctttttacggccgggatgcccgctttaaaccgctccccgcattggcaaaagcccggcgcagccataggagaaatgaaaacgggtaaagcagcaggataaagcaccctgctgctttctttgcatggctgttgagatttcgggatgccaggttcgttttgcccgaatcgagcaggttgtacagcttataagtattttaaacctgcttggatgcccagccgatatcggccgcatactggtttgtggcagcacgttttttgcatttgcaataccggccgggttccatctcgatttataaaaaccgtctcctgtcctctttgcaaatatggcgttatagcgtttgcttctatttcatcgaaaaaaagaataaaaatggtagaaaagcattttaatacccgaaaaggagctgaagcggttgaagaaaatggtgtttctggctgccgccgtgcttctggcctcagccattttgcttatggctttaaaaaaaccggacgatcccgataaaaataaaacagcaggggagaggcaggaaaccgcggtgaaggcacaaccgctatccggcggtgcagaagcaaaagaaggggaaaaggcgccggattttgcactgacaaatctatcggggcaaacggtcaaactgtctgattttaaagggaaaacggtgatcctgaatttttgggcttcctggtgcccgccgtgtaaagcggagatgccggatatgcagcgtttctatgaaaaaaacccggatgtcgcagtgcttgctgtgaatttaacgaataccgaaacaaacgagaatgcgccgcttgactttgtgaagaaaaacggccttgcttttcaaattctgtttgacatggacggctccgtcggcaccctttacaaaacggttaccattccgacgacttactttattgatgcagaagggaccatcatccgtaaaatcatcggcccgatggatgagaaaacgatggccgaatttgcgcaagagtgcaaaaaaaggggggaagggaagcccgaatagatcatggattttttaagaaaaaagtggtacagtatacagtagtagggaatgtaaaaaggaaaggcgctgaccatcatgatgtacggtggctatggcatgatgggcgtattcagcctaatcggcatgattgcccagcttgtcatctttgtgctcgtgatttttttgatagtggcaggcatcaaaaaagtgagcgaattccggccgcatcaaagggaagacaaaagcttcgacattttgcgggaacggtatgcaaaaggggaaatcacggaagaagaatttaaaaaaatgaagaaggatttgatggattaagggattatccggcttcttttttacacaaaaaagcgggggcttgcattacaagcctccgcttcatgattactggatttgaatccgtttttcggatgggccttccttcgttttcttcggaatatgaattttcaggacgccattatcaagggtggcgctgatttcgtcttcattaatattatccacgtaaaacttccggacgaattcgccatagcggcgttcctgccggataactctatgtttttcatctttgctttcttccatttggtcgcgttttgcacggatggtcagctcattattgcggacatcaatggtaatgtcctcttttgagaagcccggcagttcggcctccacaagataagcatcttctttttccgtaatgtcggtacggaacgagtttgcgttcgcaaaaggcgccaacgcattcgcatcaaacatctcattgaaagtcttcatcatacgttcgaaaacatcgtcgtttcttctgaacggcattaaatcaaacatattcaatccctcctttttagtattattataccccactataaaaaagttaaaacaaagatgcctatgcacaacagatgttcacaaaattgtcaatctataacgatggatttccggtgttaaaaaacattacaatggtactgaacatcaaaaaagaaaaagcaggggtaggatgaacaagataaagttaggggctctgattttaatcgtggtcattgtgggtattggcggtgttttcttttataacggctatgtgaaaatcagcacaaatcataaagcggcacagcatccggatctgcccattccagccgttttaaaagatacgaacccggatcccaacgcggcggagtatactttaaccgcacagcaggggaaaaaggcgtttatttccaggaaaacaacagcaacgtacggatataacggcgactatttggggccggtcatccggttgaaaacgggcgaaaaagtgaatatcatcgtaaaaaataaattgccggaagcaacgacggtccattggcacggcctcattgtcccgggttcggctgacggcggcccgcatgctgtcatccagccaggcaaaacatggatagcaaagtttacggtgagccagcaggctgccacgctctggtaccatccccacccgatgggaaaaacaggcgaacaggtatacaaaggtctggccggtctgatttatgtcgatgacaaacatgcggaaagccttgatattccgaaagactacggcaaaaatgattttccgcttgtgctgcaggaccgccgctttaacaaaaacggccagctcgtgtacaaattaaatatgacagatgaaatgtacggcttccagggcacaaccgaactggtaaacggcgcggttaagccgcagttaacggtcaggcgcggcctcgtccgtttccggattttaaacggggcaaacggcaggacgtacaatcttcatctgagcggcaacaggacatttgtgcaaattgcatccgacgggggatttctcaagacgcctgtgcaaatgaaaaaattaacgctttctcccggggaacgtgcagaaattttggttgatttttcaaaaatgaaaaacggcaaaacgctccggctccaaaatgggaaagaaacgctcatgtattttaaagtaaaaggaaaggccgaccagacctacaaagttccgcaaaaactggctgtaatcgaaaaaatgccggtgcaagaagcggtgaaaacgcggaaatttgtcatgtccggcatgggcccgaacgtcagcattaacggcaggcaaatgaacatggaccggatagatgagacggttaaattacactcggttgaaatatgggagattcaaaatcaatcgactttcatgggcacgaaaaaaatggtgcatccgttccatattcacggtgtccagttccagattttgagcatcaacggcaaaacgccgcctgccaatgagcagggctggaaagatacggtgcttgtccatccgggcgatacggtgaaagtcatcatgcggttcccgtttaaagggatttacatgtaccactgccatatcctcgaacatgaagacttgggcatgatggggcagtatgaagtgaaataacgaaaaagggcgggaatgtgtcccgctctttttggtatgggaagaagcaggttaaaaaatgtaaaaaagcagcggtatccgattatttggaatccgtgcctcgcaagaaaccgatatactggaaagggcgcctgcacagtggtaaaaacctgcggatgctttctgtgcgggtctggttcattgaaagcaacattcctgcccccatcccgctgcaacaggttacaagttttcctgcccttccaggtgaagggccaaggaaaacaaggcaatgccgtccgcttttttcgggtcaatgccggttacatcgcggatctgtttcagcctgtaatggagcgtattgatatgcacatgcagggcagcggccgtttttttcagggacaggtcatgggcgagaaaggcctgcaatgtttcaagcaggccggagtggctgtacagtttcccgatcgttctttgtacaaacgcattccgtgtatcgtcctgcacttcctggaccaaaagatcaagcagcaggtcttcgtaaaagacgatgctgcccgttttttcggcggatgccagggctttttgcgcttctttaaatgattggcgaatgactactgtgccggctgttttcccgactccggccgcacaggggatgccgtatttccaagcgaattcatgctggacggcttcgaaacggctcctgaggctgcgggcggcaaacggtgtttctgcactgatcagcagcagaaaaagcccgggcccccagcggacgattagatcccggctgttctcaaattccgcctgcagcaagcgaaaagcatccgtttccaccgcttgcgggatctccgcttttaacaagcagcaaatatgcggatcctgcaccggaatcccgagcatcatcccgcgttcggcaaaatgctggtcataggcctcaagattcacccattcgtaaaagtaagcctcaagcccccttgttttcgactggatttgttcagtccggacggtttcctgaatgatcaattccgtcagccgccggatcaattccgcataatgttcaactttttccgggtttcccgtcaccccgatcaccccgatggtccggccttcaaaccggattggcatgttgatccccgaccgcacgccttccatctgcgccgccattttttcatcaatgtacagcttccggcccgtttgaaaaactttgcgcgcccctgcatggatatgcccgatccgttctttttgcgtcgaggcaataatcaccccgctttcatccacgacgatgatatcctcatccatcaccgattgcacttcatttacgatatttttagcaagtttcgtgtataatagcatctcggcccacctttgtataaaagtctaaaaaacaagcaaaagaaaccggtaaactttgtatctttatctatatcattccccatgatttagatttatcataaaaagaaacagaaaacaattttttgactgtatcaaagatcaaaaagaacgggggaatgtttcatgattgaaagcggggccaaagaaaaactgattcaagtcgtcggccgggaaaattacgatgacacgcaggcgggccggcttgtatattcctatgacgccagcccgcagttccaggcgatgccggatgcggttgtcgcgccgcgcaataaagcagaagtgcaggcgattgtgaagctttgcaacgaataccggattccggttgtcccgcgcggatccggctccaacctttgcgccggcacatgcccggtggaaggggggattgtgctcgtttttaagcatatgaaccgcatccttgagattgacgaagagaatctgacggtgacggttgagcccggcgtgatcacgctcgatatgatcaaagcggtggaagcaaaggggctgttttatccgccggacccgagttcgatgaagatttcgaccattggcggcaatatcaacgaaaattccggcgggctacgcggtttgaaatacggggtgacccgcgactatgtgctggcacttgaagccgtgcttgcaagcggcgaggtcatccgcaccggcggaaaactggcgaaagatgtagccggctacgatttgacgcggcttttggtcggttcggaagggacgctcgccgtcattacggaagcgacgctgaaacttttgccgatgccggaagcaaaaaagacgatgctggcgctttaccaggatattgaagcgtgcgcgcaaacggtttccgacattattgcgaaccggatcatcccggcgacgctggaatttctggaccagccgacactgcaggcggtggaagcttttgcgcatatcggcctaccgaccaatgtgaaggcagtgcttttgatcgagcaggacggcccgcaggaagtggtggaacgcgatattgaaaagatcgcggaaatttgccgcaagcaacatgcagtcgatgtaaaggtggcagcttccccggaacatgcggaagcgctcatgacggcaagaaggagcgctttaagcgcactcgcccgcctgaagccgacaacgattttggaagatgcgaccgtgccgcgttccgaagtcgcaaagatggtggtggcaatcaatgaaattgctgaaaaatacgggctccatatcgggacattcggccatgcgggggacgggaatctgcacccgacctgccttgccgatatccgggatcaggacgaaatggagcgggttgaaaaagcctttgcggaaatttttcaaaaagcgattgaactgggcggcacgattaccggcgaacatggcgtcgggagggcgaaagcgccgtatcttgaatggaaactcggggaaacgggcattggcgtcatgaatgcgatcaaaaatgcgctggacccgaaccatattttaaatcccggcaaagtctttgccaaagaaacggatcgagtggtgatggaaaaatgattacagccgaacaacaaaaagaaatccagcagaaattcagggaaaggatggacgaagaccagctgctgaactgcatgcgctgcggcttttgcctgccatcctgtccgacctatattgaatcggggttcaaagaatcgcactcgccgcgcggccggattgcattgatgaaagccgttgtggacggcattatcgaaccggatgaagatgtggagcgctctttggacttgtgcctcggctgccgggcttgcgaatcggtatgcccgcccggcgtccagtacgggcatcttttggaagaagcgcgggatattatccagcagtcgaagaaaaagaagcagtccctgccggtaaaagtgctccgcaaagcggtctttgaagaattgttcccgcaccagaatcggatgcgcgctttaacaggcctgatcggtttttaccagcggagcggcctgcaaaaagcggcgcatgcgacaggcgctttaaagcttctgccgaaaaatttatcgtccatggaaaaagtgctgccaaaaattccaaaatggaaggaaatgaaacagcgcccggaacatttgatgccaaaagcggaagtgaaaaaacgcgttgccttttttaccggctgcctgatggacacgatgttcatggaaaccaatgatgcgacattgaaactattgcagcttgccggctgtgaggttgtcatcccgcaggaccaggcatgctgcggggcgctgcatggccatggcggcgaaaaagagatggcaaaggaccttgcccgccgcaatatcaaggctttcgaagatttgcgcgctgattatattatcacgaatgccggcggctgcggcgcttatttaatcgattacggccatttgttaaaagacgatccggaatgggcggaacgggcagcggcattttcaagcaaaataaaagatatttccgctattctcgtagagctgggcttccataaacggaaactcagcctcccgcaccaggtggtcacgtaccaggattcatgccatttgcgcaatgtgatgaagacctcttccgcgccgcgcctgctcattggcgccatcgaaaatgtagaattccgggaaatgaaggaagcggaccactgctgcgggtcggccggcatttacaatattgtcgagtcggagatgtccatgcaaattttggaccataaaatggaaaacgcaaaagcgacacatgccacaaccattgtgaccgccaacccgggctgcctgctgcaaatgaaactcgggatcgaacgggccggtttaagcggaaaagtccgcgctgtccatatcgccgacctgctgatcgaagcaatgggggaaaatgcgaaagtataaagcgcaaagcaagaaaaacacaacattttcaagcagcaggcatggcagctttgcgatttacccatggatacggacaagactaatggaaagcaatcaaaaccgctgagcgcgcactgcccggcggtttttcctgtttccggcttccggggaacagggcattgctatcagttgaataatttgtagaaattgttatgataaaagaaacttgaatgaagcatattcgggacaatatactcataaacgggcgggtaagcttgcatcttgtggacagaacggtaaaatgaatggagtgtcacggattgatcttgaaaaattttttgccggaccggcaagtgaaatcggtgctgtcaatcaggccggaagaattaaaaaagcatggcattaaagccatcatcaccgatttggacaatacattggtcgagtgggacaggccgagtgcgccgccaaaactggtccaatggttccaggacatgcaggaacatcatatcaaaatcacgattgtttccaataataatgaaatgcgggtcaaaacatttgcggacccgcttggcatcccgtttcttttcagagcgagaaaaccgcttggcaaagcattccgcaaggcgcttgctatcatggacgtgaaaaaggaagaaaccgtcgtgatcggcgaccagcttttgaccgatgtgctcggcggcaacagaagcggtttttatacgattctcgtcgtcccggttgcgcaatcagatggctttgcgacgaaactcaaccggatgattgagcgccggattatgggctggttcaggaaaaaaggttatttgacttgggaggattgaatttggaaaaagaagctgtccattgtatcggctgcggggcgctcatccagacggaagatccggatgaggcaggctacgcgccaaaatctgcgctggaaaaagagcaggtcatttgccagcgctgcttcagattgaaacattacaatgaagtgcaggacgtgccgcttacagacgatgattttttaaaaattttaaaccggctcgggcaggtggatgcgctggttgtaaaaattgtcgatatttttgatttcaacgggtcctggctgccgggattccaccgtttcgcaggcaaaaacccggttcttttaatcggcaataaagaggatctcctgccaaaatcggtgaaaagagcgaaaatggccaactggatgaagcagcaggcgaaagaactcgggctccgtccggccgatgtgctgcttgtgagcgcggcaaaggggcacggcatggatgaagcgatggctgccatcgaacagtaccggaacgggaaagatgtgtatgttgccggctgcacgaatgttgggaaatccacttttatcaatcgcattatacggcaggcaacaggggaaaaagatgtcatcaccacatcctattttccggggacgacgctggatatgatcggcatcccgcttgatgacggcacatctctttatgacacgccggggatcatcaaccaccaccagatggcgcatttcgtcgggaaaaacgaattaagggtgattacaccgaaaaaagaaatcaagccggctgtattccagctgaatgaacggcagacgctgtttttcggcggccttgcgcggcttgattatataaaaggcggcagacggtcatttgtctgctatgtttcaaatgctttaaagattcaccgtacaaaacttgaaaatgcggatgatttatatgcgcgccagctcggggaattgctccagccgccggggaaagcggaagccgcggatttcccggcgctcgttcgccatgaattttccattaaagaaggaaagacggatattgttttttccgggcttggctgggtgacggtcaacgaaccgggcgccgttgtcgcggcctatgtgccaaagggcgtccgggtcatgctgcgccggtcgttgatctgaaaaaggttctgtttttaacggggagtgagaaatatgcgcgatttatacggggtgatcggtgacccgattgcccattcgctgtcgcctgcgatgcacaatgaagcattccgggcactcgggattgatgcagactatcatgctttccatgtcacaccggaaaatctggaagccgccgtaaacggcatgaaagcaatcggcgtggccggatttaatgtgaccattccgcataagcaggcgatcatgccgtatctcgatgacattgatccgcttgcggaaacgatcggtgccgttaataccgtaatccgcaccccacacggatgggtcgggtataatacggacggcccggggtttatgcaggcgctgaaagaagaaagcggacgggtgctttccggggaaaaagtgcttgtcatcggcgcgggcggtgcggcaagagcgatttattatacgctttgccgggaaggggcggtaaccgttgatctgtgcaaccgcacggtaaaaaaagcggaagaaatgcgggacgaaagcccttttccgtgcccgtcgaaggtgcttacgcttaaagaaacggaagaacagctggggaattatacgctgattgtgcagacgacgtcgatcggcatgcatccggatacagacgcgcagccgctttccctccgccatttaaagcctggtgcgtttgtgtctgatatcatatacaatccttttgaaacgaaatttttaaaagaagcaaaaaaacgcggcgcccgggtgcagaacggcctcggcatgtttatctaccagggggccattgcgtttgaaaaatggaccggcgtaaagccggataccaggaaaatgaaaaagatcgttgaaggcattttaggaggaagttcatgttaacaggtaaacaaaaacgttttttgcgggcaaaagcccaccatttgagcccgatttttcaggtcggaaaaggcggggtcaatgaaaatatggtcaaacaggtgcaggaggcgcttgaagcgcgggaactgttaaaaatcagcgtcctgcaaaactgcgaggaagataaggattctgttgccgcagcacttgcagaaggggcgcatgcggaactcgtgcaaatcatcggcaatacgattgtcctttataaagaatcgaaaaaccataaagagattgttttgccttaagggtgggcggcatgaaaaaagtgggtattttaggggggacgttcgaccctccgcatatcggccatttgattatagcgaacgaaattttgcaggatctgaaacttgacgaagtccgttttatgccgaaccaaaatccgccccataaagaaaaaacggccggcatcaccggatgtgaccggatcaaaatgctcacgcttgccatttcggggcagccggcattttcgattgaggccatagagatggagaggcccggccgctcctacacatatgacacaatggtgctgcttaaaaagcgggaacctgatacggacttttattttatcattggcgcggatatgatcgaatatttgccgaaatggcggaatatcgaccagctcgtccggcttgtccgctttgtcggcgtcaaccggccggcatattcgcaccagacaaagtatcctgtccaatttgttgaaattccggaaattcatatttcctcctcgctgatccgtgaacgcctggaaaaaaaacggtcggtaaaatatttaattccggatgcagtgtgggaatatataaaggagcatcatttatatggaacgtgagaaagcattggaacttgtgaaagcccagctgacggagcgccgttatatccatacgctcggcgttgccgaaagcgccgtctggctggcggaaaaatatcatgctgaccggaaaaaagcggaacttgcggcgattttccatgattatgcaaaattccgtccggaagaggaaatgaagcaaatcatcattgatcaaaagatggatgaacggctgctttctttccatcatgaattatggcatgcccctgttggcgcttatctggtggaaaaagaagccggcatcactgaccgggaagtgctcgatgccattaaataccatacatcgggcagggccgggatgacgctgcttgagaaaattgtatatctggctgattatattgaaccgggccggaattttccgggtgtcgaagaagcaaggcggcttgcgggcaaagatctcgatgaagcggtgttgtatgcagccgggcacaccattgcatttttaattggccggaatcagcctgtttttccggatacgattgctttatacaatgatttagtgatgaaggaagaaggggcgtaaatggacaatcagacgttattaaaaacagtcgtaaaagcttgcgatgataaacgtgcggaagacatcgtcgttttggatatgcgcgggatttcattgattgcggattattttctgatctgcaatgggaactccgataaacaaattcaggcgatcgcccgcgaagtgaaagaaaaagcggaagaagcaggaactgcggtcaggcgcattgaagggtttgaagaagggaaatgggtgctgattgaccttggggatattgtcgcccatatttttaaccgcgatgaacggaattactataacttggaaaggctttggggagacgcgccggctgtcagtgcggagagcgttctgcaatgagttacgaaaatttcgcctatgtatacgatgcgttgatggaagaggcgccctatccgcaatggctgcagtgggtgatgcgccaaagggagcggaatggtgtcaaaggaaggcgcatgcttgatcttgcctgcggtaccggtgaactgtcactgctgcttgcacgggaaggctttgaagtaacgggcgttgatttatcggaagacatgcttgccgtagcgagcggaaaagcactggctgaaggggcccgcatcactttcctcaagcaggatatgcgcgcgctttgcggcctgcatgattttgatattgtcgcgattttctgtgattctctgaactacttggaaacggaaacggatgtgaaagaaacgtttcggcatgtgcatgcagccctgaaggcggggggaatgtttttgtttgacgtgcattccgtttataaaacagatgtgctattcccgcatcacacttttgccgataacggggacgaggtttcctatatctggaactgctttccgggtgagggcccgcatgccgttgaacatgatctcagctttttcgtatatgatgagaaatccggcttgtatgaacggtttgacgagttacataaacagcggacgtttccggttgctgattatgaaaactggcttacggaatcgggcttcgattgtatgccgcccgctgccgattttacagaagaagcgcccggcccaaaaagcgaaaggatattttttacgtgcatcaaacgataaaagcattctgcccgcgcagaatgctttttttgaaaaaattttaaaaaagaagcaggaataaacagaaagatgtcgaaatatcatggtgtgccgaattgcccggccaccgcgtccgtgtcctccttaaatttctcgtgtgtcgcttcaaacagtttttcgaataagccatccgtccctttttcaagcacctttaatccttcgccggtgataccgccctttaccgtcactttttcctgcagggcaggcagcgtataaatttgttgcttcaaaagttcccccaggccgatcagcatctcagccgttaatatgcaggcggtgtcgctgtcaatctttgttttgcggacggctccttctatcattttttgcgccaaaaaactgaaaaaagcagggccgcagctgaccagatctgatgccactctcgtgatttgctggccaacttcaaccggggtggatattttggagaacagtgtttttactttttcctgccactcgcttgtgcactggctgccaaatgtcagcaaaaccgcaccggcagctgccctgttcgtgatgctcgggatggcccttgcgcacgagcaggggaccattgcggcgagctgcccgactgtaacggggcttgtaatgctgacaaggcactgttcattccggaaggcgcctctggccttctccagaatgccgtgcatctcaagcggtttaacacacaacaaaattaaatcgctctccaaaatggtattttctatattctcaacctgaatcccgggatacttgtttgcaagttttgcggctttttcaggtgtgcgatttgtgatccgaaattgtgcaggcgtaacggcttttgtttctatcaaagcttcaattaacatgctgcccatatttcccgttccgatcacgccaatgtccatgctgttttccctccccaagccgccgatctttcagcgcccggtacaatatatgcgcagatccgggcgattatgtatctgaaaaaagaaaaacagaggtgaaggtctttgaaaacgttgtttctcaaataccgctggcatgctgctgcagctgtggcagccattacgattgcaatcttttactattttagccaaaatggaggtatggacaccgcgtccggggcttaccggcaacccgaaacggccgtgcagtccggacaaactgaggggggcgggacggatgtgcaaaatcactcgacccaaaacaccgcccaaacgcaatcctcggcccaaacgcagaacgctgccgaaatttacgtggatgtgaaaggcgcggtgaagcatcccggcatctacaaagcggaagcggatgaccgggtctatgacctcattcaggaagcggggggttttaacgaaaacgccgaccggaatcaggtcaatctcgcgcagaaggtaaaagatgaaatggtaatcgaggtgccgaaaaaaggcgaaaaagcggcttctgcccaaactgccccggcggctgccggaatttcagcacccgcttccgcttcttccgggacggcggcaagcagtgaagcggccgcacaggtcaatatcaatacggccgaccagacccagcttgagacgcttccgggcatcgggccgtcaaaagctgcggctattatcgaataccgggagaaaaacggcccttttcaaaagccggaagatttgaaaaatgtgtcggggattggggaccagacttttgccaaaatcgaaaattccatcactttacagtaaggatgagcagaaaggaagagaaaaatggaccggatttcctggaaccagtattttttggcgcaaagccatttattatcctggcggagcacctgttcaaggcttgcagttggggcgacgatcgtcagggataaaagaattatcgcaggcggctacaatggatccatcgcgggggacgaacactgtattgacaagggctgctacgtgattgacgggcattgcgtgcggacgatccacgctgaaatgaatgcaattttgcaatgtgcaaaattcggggtggcgacaaacggcgcggacctctatgtaacccattacccgtgcctgcactgtaccaaagcgatcattcaggcagggattcaaaacgtgtactatgcacaggattaccgggtgcatccgtatgcaagagagctttttgaaaaagcgggggtgcatgtcgagcatgtcccgttccatccggaaacactcgatatccgggcaagcgaaaaagccaaactggtggagaaattattcatgattgcaaaggaccacggggcggaagcggcagaactggaggaattgcagcaaatggcggcggcattatttgcaggcgcttatcaagaaacggaaacgggatccgttccgaaagcgtaacagggtgatggtgtgaaaggcaactggctgttcgccgcgctcgctgcattaagcggcatcctggttggccttcacgcgccgccgcttctggttctttcggcccatttgatttggatccggattttcctgtcccggaaccggcctttgctcctgttgtccgccgttttttacgggttggggatttttagcggttatttccaggcatttgcgtatgatacaaaatttcatgccggcagtgcccggatgcccgtccgtttcagcgattatccgcgcatcgacgggaacgcggtcaagggaaaggcggaagccggaaaagaaacgtttatgttaacgtattacgccgggagcgaggcagaactggaaaccttgaaacaaactttatcccccggaacggtttgcatggctcaaggggaactggaagctcctgagccaaaccgcaacccgtccgcatttcattaccgcaactatttggcccatcagcatatccactggattttaaaagcggaccggctttccgcgtgcaacagcccgccgcagcatctgcacggtttcttgaaaaaaatccgccaccgctccctgcttcaaattcaaaaaacatttccggaaaaatccgtaccgtacgcagaagcgcttttgtttggcgagcaaacagactttgatgacgatgtgtaccagctttaccagcggcttggcgttgtccatctgcttgccatttccgggcttcacgtacaactcgttgccgggttttgctactatttgctcatccggctcgggctgacaagggaacgtgccaccgtttgcttactgggggtgatgccggtttatgcgggattatgcggcatgaacccgccagttgtccggtcggcggcaatgacgatgctgcttgtgctggccaggcaaaaaaaactgccgatcgggccgcttgatgctttgtccatctgtttcattttgtacggactaaaaaatgcgaatattgtgtacaatatcggattccagctctcttttgctgtttgcgccgcgctgcttctttcaggtcctcttctagagcggttccggggcccgttgcaaaaagggctcgcgatttcgttcatttcccagcttgcggcacttcccatcctatcttattcattttatgagttttccattgcggggcttgttgccaatcttttttatgtaccgctttatacgtatgtgctgctcccgcttgctgcgcttgcctttgttacagaatgggtggcgccgccgctgttttccgtctttgccgcgtgctttgacgggctcgttcggctttcggaaaaaacgggggaagcgatagacggccgctggtccacgctcgttaccgggaggccgccatactggggatcgatcctgatggcaggtgcgggagtttattgtttggcggcgatggaaaacggcaagaaaacgatccgggctgtcctgccgcttgtttgtgttctcatgctcctccttgcggcaaacaggtattcgcttttcggcaaaatcacctttatcgacgtcgggcagggggacagtattttaatccggctgccgctttcaaggggggcgtatttaattgacacaggtgggaccgtccggtttccggaaccggcatggaaaagaagggagcatccgtttgaaaccggcaaagatattgtggtgccatttctaaaaagccaggggattacgacgattgataagctgattttaacgcacagcgacgaggaccatatcggcggcgcaacggctgtgatcacatctctccacgtcaaagaaatccatatctcgccccattcatgggaaaaaccgctcatgcagaaggtgctcgcttgcgcccgccagaaaaaaatcccggtgtatgagatgaaaaacggggacggatggcaaaacaaatcgggggtatttcaatatctttcgccgtttgacgaaacgtatgaggggaataatgactcgcttgtcctttatgcgaaaacaggtggaaagacgtggctgtttaccggggaccttgagcaggaaggagaagaaaaacttgtggcggcttatccggatatccgtattgacgtattaaaagccgggcatcacggcagcaaaacttcgacaagcgaaacgctcatccggaagtatcatccgcggatcgccgtcatctctgtcggaaagcataaccgtttcgggcatccgtctccgggagtggtcaaacggctcagcgaaaacggggtattcattttccggacggatgaggacggggcggtgcaataccgctttttcaaagaaaagggaaccttttcaaccgtcctcccataatatacattaattaaaaaaccgtccggaatggctccggcactgcccggagcggggctatctgccaatgatgtctgctgcagttgcaatgataaacatcagcgcaaaaaacaaaaaagagatgagaaaacctgctccggcatcggcgacatcattcgttttcgactggacatcctgctcgaattcgttcatccaaatccctccctgttttttgattatatgataatttcagaacgatttccaccgttttggatggagttgtcattcatagatatccggctgcgtgtgacaataagggtacgggtccaccgttaacggaaaagcttcccgggactgttccgttaacgtttatatagataaaggggattttacggatccccttttccatttgttttctgcttgcaacaatgcgcccgttctcttaacatagggggtaagaaaggtttgggagcggaacagaatggatgaattatggaaaaagattgagcgcgggcaattttccccgctttatttattgtacggcgcagaagattatttcattcaaaaaacgaaacagaaattgctggattatgcgctcactccggaagaggcggattttaattatgcttcgtatgacctggaggaggtgccggtcgagacagcgatcgaagatgcggaaacattcccttttatgggggagaggcggctcgtgattgcgcaccacccgttttttttgactgctgaaaagcagaaacagaaagtggaacaccggctggacaagctggaagcatacgtgaagtctcccgccccttacacggttttcgtgctggttgcgccttatgaaaaactggatgaacggaaaaaactggtgaaattgatcaaaaagcaggccgcaactttccaggcaaaaaaattaaatgaaagggagcttgaagggtggcttgtctcccgcgccgctgaagaaggctgccggattggcaggaaggcagtggaacatttggtttcccttgccggcaccaatatgaatgcgctcgatcatgaaataaataagctagctctatatgccggaagcggcaatgaaataacagatggaatggtggaaatgctgacggcgcggtcgctggagcaaaatgtatttgaactcgttgaaaaagtggttcaccgccgcattgatgaggcgctccggatctattatgaccttttaaaacttaatgaggagccgattaaaatattggcgctccttgccggccagttccggctcatctaccagacgaaagaactggcgaggctcggctacggccagcagcaaatcgcatcttatttaaaagtgcatccatacagggtaaaactggcggcggggcaggcggggcttttttccgcggatgaactgaaccggatcatggcgctgcttgccgacagcgactaccggatgaaatcgggcgggctgaaaaaagaaatgatcattgagatgtttttgtttcaactgcatgaaatgaaggcaaaataaaaaagacgcggatcgcgcgtcttttttattttggtgcgttacgcctgtgcggataattttttcatcaggcgtgattttttgcggcttgccgcatttttatggataaggcctttagatgcagctttatcaaggcgttttaccgcatcgactaaaagttcttttgcgttttcgtcgttgttttcaaccgctgcttcaaactttttcactgccgtgcgcatggcggattttgccgctttattttgagcatggtttttttcgttcacttttacgcgtttaatcgcagatttaatgtttggcacccgtttcacctcctacgagcaaaccttgtttggctcgtccacattcactttagaacaaatgatattgtaacaaatggaagacgagattgcaatacattgggccggaatttgcacaaaacgaatggtctgccgggaatggggaaaaacaaggataaaggaaacggcaaaaaggaggaagacgaacaaatggatcttagtgtttattccgtccgcacagatttagcgattgaagcgcgcgatcttgcagtggaagagaaagtgaagaaccgggaaagcgaagaattggaaggcgtaacggtggaagaacggaccgtaaacgatatgaaagtgacgacggttcaaatttccaaaaaaggggaaaaagtcatcggaaaaaaggccgggaattatttgaccattgaaatgcagggcatccgcagcggggatacggacatccagcaaaaggtggaagaagtgttcgcggatgagtttaaccaatatttgaagcatataaatattggagaggaagcgagctgccttgttgtcgggctcggcaactggaatgtgacgcctgatgcgctcggcccgcttgtttgcgaaaaagtactcgtcacccgccatctgtttaaaatcgagccggaaaacgttgaatcgcgctacaggccggtgagcgcgattgccccgggggtcatggggatgaccggaatcgaaacgagcgatattatattcggcgtcagtgaaaaatcgaaaccggattttattattgtcgtcgatgcacttgcatcccgttcgctggaaagggtgaatgccacgatccagatctcggatacgggcattcagccgggatccggtgttggcaacaagcggaaagaattgtcgaaagaaacgctcggggtgccggttgttgcgatcggcgttccgacagtggtggacgccgtgacgattacaagcgacacgatcgattttctgttaaaacatttcggcaaagaaatgaaagaatcaggccggccttcacgggcgcttgcaccggcagggctttcatttggggaaaagcggaagctgacggaagacgatctgccgggaagtgaagcacggaaaatgttcatggggattgtcggcaatctggatgagcaggaaaagcggaaattgattcacgaagtgctcgcgccgctcggccataacttaatggtgacgccgaaagaagtcgacatttttatggaagatatggcaaatcttctggcgagcggactgaatgcggcgctccacccccatgtgaaccaggaaaataccggctttaagacgagataagttacaggcgccgccataacccgggggtgcctcttcttttcggtgttctattcttccatgagattcatagaatgtaatagaatcgattggaaagggtgggacgatgaaaagcggcaggcattccagccatttttttatattgaatctgaccagtgtgatacgccttatctccatagtcatcctgtcccttgtgcttgttgtcatcttaattggcacgctgacgtctttgaagccgggttaccgggtttcctcttcagccgtcaatgaagccgcaaagcatctttcaagcaaaacattgtacaagtacctgctgtcggacagccagctgcttgtgcaccattttccggatacggacgagcggccggtcggcaatcttgtttttgaaatgctcaccaacatccgctttgaagatccgcgcagctttctcgggcgtgaactgccaggatttgaaatctttgacagcaaaatacttgttgccggagacggcgctgactataccaatatgccgattgaatccgtcccgcctgacagcgccttgcaagcgaaagacccggccacacaaaatacggaaaaaatcgaggaaaaaggcggtgcggacgatgcaaaacggcggcccgggcggacaacgggcggcaagaaacgggtgttgatttattttacccatacacatgagtcctatctgccgtatttaaaaggcgtcacgaatcccgaccttgcccagcattcgaagatcaacgtaacaaaagtcggggagaggctcgctgaagatctcgaggacaagggaattggcgcagaggcaaatacgaccgatgttttaaagctgcttgagaaaaaccatatgcagtattaccagtcttaccagggatcgcgcaccgtcgtcgaatcggcgatgagaaacgatcgcgaccttcaatattttattgatatccaccgcgattcgagaagaaaaaaagatacgaccgttaccatcaatggaaaatcgtatgcgaaaatcgcttttgtaatcggcggggaaaacccgaactgggaaaagaatgcaaagctggctgaggatttgcacaacttgatcaaaaagaagtataaaaatctgtcaaggggggtcattttgaaaaaaggggcgtcgaccaacggaaaattcaaccaggacttatcgggaaatgcttttttgattgaagtcggcggtgtggataatacttttgaagaaatgtaccggacaatggatgtttttgccgatgtgttcgccgggtattactggcaggcggacagtgtaaacggcgccgggagcgggcaatcaggaaaccgttagccgtcttgacaggcggttcttttttttgcgatgcgcggctgatcatttttcgttgaagtcgcgctttcctgctgatataatcagaaatagtgtacatgtgccgaatacaggagtgaaggtaaatgatgaaccgtgaagaaaaattagacaggcagaggaggatccgcaacttttccattattgcacatatcgaccatggcaagtcgactttggccgaccgcattctggaaaagacccacgcgctgagcaagcgcgaaatgaaggaccagctcctcgattcgatggaactggaacgggaacgcggaattacgattaaattaaatgccgtccggctgaactataaagcaaatgacggggaagaatacattctccatttgattgatactccgggacatgtagactttacatatgaagtgtcacgcagccttgccgcctgtgaaggggcggtactcgtcgtcgatgccgcgcagggggtggaggcgcagacgcttgcaaatgtttatcttgcgctggataacaatcttgaaattatcccggtcatcaataaaattgacctgccttccgccgatccggaacgcgtccagcaggaaatagaggatgtgatcggccttgatgcgtcggaggccgttcttgcttccgctaaagccgggattgggattgaagatattcttgaacaagttgtcgaaaaagtgccggcgcctgaaggagatccggacgccccgctgaaggcgcttatttttgactcgctgtatgatccgtaccgcggcgttatcgcctatatccgtgtaatggaaggctccgtcaaagtcggggataagattaaaatgatgtcaaccggcaaggaatttgaagtgacagcgctcggcgtaagcaccccgaaaccgttgtacatagacgaattaaccgtcggtgatgtcgggtttctaacggcatcaattaaaaatgtaaaagacacgcgcgtcggcgatacgattacgggcgccgaaaaccctgcaaaagaagcacttcctggttaccggcggatgaatccgatggtttactgcggcctgtatccggtagacagcgcgaaattcaatgatttgcgggatgcccttgaaaagctggagttaaatgattcgtcgctgcaatatgagccggaaacgtcgcaggcgctcggtttcggtttccgttgcggttttctcgggctcctgcatatggaaatcatccaggagcggctggaacgcgaattcaacattgatctcattaccaccgcgccaagcgtcatttataaagccaaactgacggacggcagtgaagtgacggttgataacccggcgaatttgccggaaccgcagaaaatcgaatatatcgaagagccgtacgtgcgcgcgtccattatggtcccgaacgattatgtcggcgcagtgatggaaattgcccaggcaaagcgcggcgattttatcgatatgcagtacctcgatgatatccgcgttaatgtcatttatgaaatcccgctctccgagattgtatacgacttttttgaccagctgaaatcaagcacaaaagggtatgcttcttttgattacgaattgatcggctacaaacagtccaatctcgtaaaaatggatattttattaaacggggaaaaagtggacgccctcagtttcatcgtccaccgcgactttgcgtacgaacgcggcaagacgattgtcgaaagattaaaagaactcatcccgcgccagcagtttgaagtgcctgtacaggcggcagtcggccagaaaattattgcgcgttccaatattaaagcattgcgcaaaaacgtgctttcaaaatgttacggcggggacatttcccggaaacggaaactgcttgaaaagcaaaaagagggcaagaaaaggatgaagcaggtcggttctgttgaaatcccgcaggaagcgtttatggctgtgctgaagatggacgataccccgaaaaaataaccggggcgggcagggagcggattggcggctgtccgcgcgctccttttccccgggacatgcccgtgatgaaaacaaataaggttgtgatggaatgaaagccgcatatatccatgttccattttgcgaacatatttgctattactgcgatttcaataaatttttattaaaaggccagccggtggatgaatacattgagatgctgctggaagaaatgcggatcaaaacggctgaatccccttgtgaaaagctgagcacggtctttgtcgggggcggcaccccgacagcgctgaatgagcggcagcttgaaaaactgcttgccggcatccgcacgattctgccttatgacggggacggggagtttacgtttgaagccaaccctggggaaacgtccgaagaaaagctgcgccttctgcatgattacggtgtcaaccggctgagtttcggcgtccagtcgttcaatgaccggctgctcgagaaaatcgggcggacccaccgccgggaagatgtgcaccggacgatcagtcatgcgagaaagatcggcttttccaatatcagcatggatttgatgttcgcgcttcctgggcagacgcttgaagatttccgtgaaacgcttggcgaagccttgtcgatggggctgccgcattattcaagttattcgctgatcattgagccaaagacgattttttacaatctgatgcggaaaggaaaactccgcctgccgtcacaagatgcggaagcggatatgtacagcatgttaatggacgagatggaaaagcacggcttgaaacagtatgagatcagcaattttgccaaacccggctatgaaagccgccacaatctcgtctattggaacaatgaagaatatttcggtttcggcgccggcgcacatgggtatgaaaagggtgtccgtctgtccaattacggcgcattgaagaaatatatcggcatgcttcgggacgggtgcctccctgtcatgaaaaaacatacagagacaaaaaaagaaaaaatggaagaagaaatgtttctcgggctcagaaaaaacgaaggcgtccgtttccgccatttccgtgaaaaattcggggcggatatgaaggaggtttttgcaggcgcgatcaaagaaatgacagaacgcgggcttcttgaagaaaagggcggttttctccggctgacaagggaagggcgttttctcggcaatgaagtctttgaagcttttctcctcagttgacgggcaaagtaaatatattgacaacaacaggggattttgttaatttatttatataaattagcactcgtttatatggagtgctaacaggggtgatggaagttgttaactgatcgtcagctgttgattttgcaagtgatcattgatgactttattcgttccgcccagccggtaggttccaggacgctttccaagaaaaacggcatttccttcagttccgctacgatccggaatgaaatggcggatcttgaggaactcgggtttattgaaaaaacacatacgtcatccggtagggtgccttctgaaaaagggtaccgttattatgtcgatcaccttctgtcgccacaaaaactgggaccggcagacatttcgcagcttcattcgatttttgccgaaaaaatagatgaaatggaagagcttgtgaaaaagtccgcccaaattctttccgaaatgacgaattacacggcgattctgcttggcccggaagtcaaagatacgaaactgaaaaatatgcagatcgtcccgctgaatgaaaaaacggcggttgccattatgattaccgataccggccgcgtggagaacaagacggtttcgctgccggaaggattccgcccgggcgagctggaaaaaatggtcaatatttttaacgaacggctggccaatgtgccgattccggatttagaggataaaatatataaggaagtcgctgacattttgcgcagccatactgaaaactatgaatcgatcctgaagaccgtgatcagcatgtttaacgaaaaccggcatgataaactttttgtcggcgggaaagccaatattttgaaccagccggagttccatgacctcgagaaagtccggaccctttttgatatgatagaacgggaagacagtttttatgacctggtcaaacgcgtgccgagtggcattcacgtaaaaatcgggagagaaaaccagatttccgagatggtagattgcagcatgattacagccacttattcgatcggtgaccagccggtcggcaaaattgcaattttgggccctacgcgcatggaatattcacgtgtcatcagtatagtggatttcttgagcaatgatatgaccaacgccttgacgaaattgtatgacagataggcaatacgggcatattgggtagggaggcttaaagcgcgggcacatgctttaagtcctttcttactgggcttttttatgcccgtctcattttaaagggggtgaacgctcatggcagaagaacaaaacaaacgcgcttcagaagaagtgaaagacgaacaaaaacgggcttcggatgaagtgaaagaaggacaaattgaatccatttttgcggaagaaaaagatacggaaaatccgcaggcggcgccggagggcgaaggcaatgaagctaaaacggcgaagaagcctgaaacagaaaatgccgctgaagaactggaaaaagcaaaagaggagattgagaaattgcggaatgagctcgaacaggctgaaaaccgctatctccgcctgcgcgcagattttgataattacaggcgccgcgtgaatctggaccgtgaagcagccgagaaatacagagcacaggatctgattgtgaacctgctgccggcgcttgacaattttgaacgcgcactgtccatggctgaaagaaacgaacatacggcccagttgctggacgggatggaaatggtctaccgcagcattttggaggcgctgaaaaaagaaggcgcagaaccgattgaagcaattgggaaagaattcgacccgcactatcaccaggcgatcatgcaggggcaggaagaaggcactgcgtccaacgttgtgattgaggaattccaaaaagggtacatgttaaaagacagggtgatccgcccgtccatggtgaaagtgaacgagtaacgcgctttacataatttttaagggaggcattatcatgagcaaaattatcggcattgacttaggtacgacgaactcatgtgtcgcagttctggaaggcggcgaaccgaaagtcattccgaacccggaaggaggcaggacaacgccgtctgttgtcgcttttaaaaacggggaacgccaggtaggggaagtcgcaaaacgccaggcgatcacaaatccgaatacgatcatttcgatcaaacgccatatgggcacgacacacaaagtcacagcggaaggaaaagaatatacgccgcaggaaatttccgccatgattctgcaatacttgaaatcatatgcggaagattatctgggcgaaaaagtcgaaaaagcggtcattacggtccctgcttatttcaatgatgcccagcgccaggcaacaaaagacgccgggaaaattgccgggcttgaagtcgaacggattatcaacgaaccgactgctgcagcgctggcatacggccttgacaaaacggatgaggaccagaccatccttgtatttgaccttggtggcggtacgtttgacgtctccatccttgaactcggcgacggcgtctttgaagtgcacgcaactgccggcgacaaccatctcggcggcgacgacttcgaccaggcgatcatcgattaccttgtcagtgaatttaagaaagaacacggcatcgacctgtcgaaagacaaaatggcgctccagcgtttaaaagatgcggctgaaaaagcgaaaaaagacttgtcaggggtcacttccacccaaatctcgctgccgtttattacggcaggggaatcaggcccgctccacctggaaatgacgttaacccgtgcgaaattcgacgaactgacggcagaccttgttgaacggacaatgggcccgacacgccaggcattgcaggatgcagggcttacagcgaatgacatcgataaagtcatcctagtcggcggctcaacccggattccggccgttcaggaagcgatccgcaaagaaatcgggaaagaaccgcataaaggcgtcaacccggatgaagttgtagcaatgggtgccgcaatccagggcggggtattgacgggggatgtgaaagacgtcgtgctcctcgacgttacgccgctgtcgctcggaattgaaacaatgggcggcgtgttcacgaaattgattgagcgcaatacaacgatcccgacttcaaaatcgcaaatcttttcaactgcagcggataaccagacagccgttgacattcatgtcctgcagggcgaacgcccgatggctgccgacaacaaaacgctcggccgtttccaattgaccgatattccgccggcaccgcgcggcattccgcaaattgaagttacgtttgatattgataaaaacgggattgtcaatgtcagcgcaaaagaccttggcaccggcaaacagcaaaagattacgatcaaatcgtccaccactttgtccgatgaagaaatcgaacggatggtaaaagaagcggaagctaacgcagaaaaagacaagaaacgcaaagaagaagcggaactccgcaatgaagccgacctgcttgtattcactgctgaaaaaacattaaaagaactggaaggtaaagtggacgcatctgaaatttccaaagccgaaaaagcaaaggacgaattaaaagcggccattgagaaaaatgatctcaatgaaatgaggcagaaaaaagatgcgctgcaggaaatcgtgcaggacttgtccgtcaagctgtatcagcagtcagcacaacagcagcaaaacacggatgccgggggagacggaaaaaaggatgacaatgttgtcgacgctgattttgaagaagtcgatgataataaaaaataacgataaaacaatatggccatttttcaatgagccaggaaaaaagtcaaagtctggtctattctcggctttgacttttttcttatgcgaatgctacaattacctttatgtgaacgtttcgggagtgagaagaaatgagtaaacgggattactatgaagtgttgggcgtcgcgaaagatgcatcgaaagacgagataaaaaaagcgtaccgcaagctttccaaaaaataccacccggatattaacaaagcgcctgatgctgcagaaaaattcaaggaaatccaggaagcgtacgaagtgttgagcgatgaccagaaacgcgctcaatatgaccagttcgggcatgcagggccgaaccagggcttcgggggcggaaacggttttggcggattcagcagctcggattttgacagtttcggtttcgaagatattttcagcacattctttggcggcggcagaagaaatgacccgaatgcgccaaggcagggggctgatttgcaatatacgatgacgcttgaatttgaggaggcggttttcgggaaagagacggacatccagattccgcgcgaggaaacttgtaatacctgccacggaaccggggcaaaaccggggacgcatccgaaagaatgcccgcactgccacggaaccggacagctcaatactgagcaacagacaccgttcggccggattgtgaaccgcagggtatgccattactgcggcggtaccggcaagatcattacagacaaatgcaaaacttgcggcggtaccggaagagtgaaaaaacgccgcaaaattcatgtcaaaattccggccggcatcgacgacgggcagcagctccgcgttgcaggccagggcgaaccgggcataaacggcggaccggccggcgacctgtacatcattttccacgtccggccgcatgaactgttcgaacgggacggcgacgacatctactgcgaaatcccgattacttttacccaggctgctttaggcgatgaaatcgaagtgccgacgttgcacgggaaagtaaaattgaaaattccggccggcacacaatccggcacaaaattcaggctgcgcgggaaaggcgtgccgaatgtccacgggcacggcaccggcgaccagcatgtcatcgcgagaattgtcaccccaaggaagcttaccgaacggcaaaaacaacttttgcgcgaattcgccgaagcgagtggagaggtcccggatgaacaaagcagcaatttttttgacaaaatgaaacgggcatttaaaggggactaaacaggaatggagtgaggcgttcatgaaatggtcggaaattatgatccacaccacgaacgaagcggtggatccgatttcgaatattttgtatgaagcgggcgccggcgggattgtgatcgaggactcggatgagctgctgaaagagcatgacgaccggttcggtgaaatttatgaactggatccggacgattttccggaagaaggggtcatcattaaagcgtacctgcccgtaaacagctttttaggtgaaaccgtcgaggaaatcaaacaggcgattaccaatctggccacttttgatattgatatcggcccgaacaaggtgacgatcagcgaagtgcatgaagaagaatgggcaacggcatggaaaaaatactacaatcccgtgaaaatatccgaaaaatttacgattgtgccgacgtgggaaaactatgagccggtatcaagcgatgagctgatcattgaattggaccccggcatggcgttcggcaccggtacccatccgaccacggtcatgtgcatccaggcattagaacggacggtaaaaccgggcgacacggtcattgatgtcggcaccggttccggcgtgttaagcattgccagcgccctgctcggagcagggcgggtgcttgcgcttgatctggacgaggtggcggtccgtgcggctacgctcaatgtgaaactcaataaagtccaaaaccgggtaactgtcaaacaaaatgatttgttgaaaggcgtaagcgggcaagccgatgtgatggtggccaatattcttgctgaagtgatcgcccgttttgctgaagaggcattcgggcatgtcaaaccgggcggccgttttattgcttccggcatcattcggcaaaaaaaggaccttgtcgtggatgcgctcacttcttccggcttcacgattgaagaaacgatggtcatggaagactgggttgcgctcatggcaaagcgcgggtgagaggccatgcagcgttattttttaaaccggccgtatcggggggagcaggaaatccgcctggacggcgaaaattaccatcatatcgcgcgcgtcatgagaatgtccgccggaagccgcttttatggtgtattttcagatgaaaaagtgtgcatttgcgaaatcggggaaatcacaggcgatgccgttatggcccggattaccggatgggaaaccgccgtaaaagagcttccggtccatgttactgtatcatgcggccttccgaaagcggataaactggaatggatcatccaaaagggaaccgagctgggtgcctttcattttttgcctttcattgcggaaagatccgttgtaaaatgggacacaaagaaagaagcaaaaaaacgcgaacgctggcaaaagattgcccgggaagccgcagaacagtcgcaccgcagccacttgcccgaaatcagcccccctgtttctttccagcagctgatcgaagaaagccatacatatcaatataagctggttgcttttgaagaaaatgcaaaagaaggggaacggcaccggtttgcggaagtattgtcgaacatatcggaaggcggcaatgtactggccgttttcgggccggaagggggcctatcccttgatgaaatccgcaggcttgaagcagccggattcgtatcctgcagcttaggcccgcgcattttgcgggcggagacggcgccgttatatgtactttctgccataagttaccattttgaattaatgaggtgaagaggatgtcaaccgtagcattccatacattaggatgcaaagtgaaccattatgagactgaagccatttggcagctgtttaaacaagcgggctatgaaagaaccgactttgaaacgaatgccgatgtctacgtgatcaatacttgcacggtcaccaatacaggagacaaaaagagccgtcaggtcatccgccgggcagtccggcaaaacccggatgccgtagtttgtgtgaccggctgttatgcgcagacatcgccgggcgagatcctcgaaattcccggtgtcgatgtcgttgtcggcacacaggaccgcaccaaaatgcttgggtatattgaacagtatttgaaagagcgcaaaccggtcaatgctgtcaaaaatattatgaaaaaccgtgtgtatgaagaaatggaagtgccgtattttaccgaccggcaccgggcttccctgaaaatccaggaaggctgcaacaatttctgcacgttttgcatcatcccgtgggcgcgcggcctgatgcggtcgagggatcctgaaaaggtcatcgcgcaagcccagcagcttgtcgatgcaggctataaagaactggttttaaccggcattcatacaggcggatacggccaggatttaaaagattacaatcttgcgatgctgcttcgggacctagaagaaaaagtgcaggggctgaaacgcgtccgcatttcgtctattgaagccagccagctgacggatgaagtgattggtgtgattaaacattcgaaagtcgttgtccgccatatgcatgtcccgatccagtccggttccgatacggtgctgaaaagaatgcgccggaaatatacgatggaccagttcgcggaacggattaccaagttgaaagaagcattgccgggccttgcactgacttctgatgtcatcgtcggcttcccgggtgaaacggaagaagagtttatggaaacatacaatttcataaaagaacaccggtttgcggaactccatgttttcccgtactcgcccaggacaggtacgcctgctgccagaatgaaggaccagattgatgaagaaatcaaaaatgaacgtgtccaccgcatgatcgtattaagcgaccagctggcaaaagaatacgcatcccaatttgaaaacgaggtgcttgaagtcattccggaagagccgttcaaagaagatccggaaagcgggctgtacgaaggctataccgataattacctgaaagtcgttttcccggccaccccggatatggttggaaaactcgtcaaagtgaaaatcacaaaagctgggtatccatataatgaagcacagttcgtcagagtgatggacgacgtcatgccggccgtaaatgaagccatgtaacgcaaaaaccggatggcgtgtttgcccggaaaaagcgcgcctgataaaaggcagccccataataggaaaaaaagtgccgcataatggcattgaagaggccagggcagtttccggataaaatgcctgccctttgaagcacatggcaaaaacaaccgggcttttagcccggttgttttatttttttccgtgcaaagcgatgataaaccggccgaatctttcggaaaatggcaaaacagccagtgaggatagaagattaaacaataggcttgcatgggcaagctgttgttccggattagccgacagcattcggcaagtgtccgcgagcacatgcaggaaaggcaagaaaacaagcgcccctccggcattcagccagacatgggtaaatgccgtcagccttgcttcctctccggccccgatgctggccagaagcccggtgatgcatgtcccgatattggccccgagcatgatgctaattccggtttcaagcgggaataccccggctgcaagaaaacccatcgccatcccgatcgtcacggtgctggactggatcgctgcagaaagcaagattccgagtaagaaagcggacaagaggtgggtatttaaaacggtaaacaaatgctggacaaaagcggtttttgataccggcacggcaagctcctcaaatccgcgcattgccccgaacacaagcgagaggccgaacagaataataccggcgcttttgacgcggccttttccgaaaaaatagaacactgctcctgcccccaaaaaaggcaggctcaaagaggagaagtcgaaagtcagcaattcgagcgtgaaagtcgtgccaatattcgtgcccaaaatgattccgatcgattgcgaaaacgtcagcattccggcagaaacgagcccgacagtgatgaccatcacggcggagctgctttgcaaaagcgccgtcaaaaccatcccgaacagcatggcggacagcggcctgcctgccagttttttcagtgcatttccggcatggccgccggataaggcaaacagcccggcccgcagcctgtgaatgccgaataaaaatgtcaccgtcaacaaaagaaatgaaagtaaataaagcatgtccttccccccttatgatcatatggaaagggggtatcgaacatgcctttttattatttggaaaatccatttaatacaacacacgaaaatcacggtactgttcttgctgctgtaaatagtcaatatccattccggttacttttgcaaagcgcgacggcccttttttcagcccgcggataaattgttccatctcttttttcctgccttgtgccatcacttcgacagtgccatcgtctttgttgcggacccacccgcatatattgtattgctttgccaaaaattgggtgtggtagcggaagccgacgccctgtacccttcctgaaacaatgatatgtgccgtttcctgttgttccatcgtcttcctccaatcgttctttgatctctattataccaaaaggaggaacaggcggggcaaataaggcaaaagccaaatcacgaaagacaaggcgcaaatgttgaccggttatggaggatattatataataataaagtgcacgggttgctcaacctgacatgtaaccgtttgtgttcggagggagggaaagaaatgtctaaaactgtcgttcgaaaaaacgagtcgcttgatgatgcgcttcgccgctttaaacgtactgtttcgaaaaccggaactttacaggaatacagaaagcgcgaattttatgaaaaaccaagcgtaagacgcaaaaagaaatcagaagctgctagaaaacgtaagtggtaagagagggtggaatgatgagtcttctcgagcgtttaaatagcgatatgaagcaagcgatgaagaacaaagataaagaaagactctccgtaattcgtatgcttaaggcagctgttcaaaacgaagcgatcaggctcggaaaagacggtttgacgaatgatgaagagttgacagtcctttctcgcgaagtgaagcaacggaaagactccctccaggaatttaaaaatgcaggtcgcagtgaccttgttgaaaaagcagaaaaagaattggcatatgtgaacgcatatttgccggagcagctttctgaagacgaagtgcgtgaaattgtccggcagaccattgaagaagtgcatgccgggtctaaagctgatttcggaaaagttatgggagccgtcatgccgaaagtaaaaggcaaagctgacggtacggttgtaagaaatattgtgcaacagcaattatcctgacctttctcatataagccggaaatcaatatgatttccggcttttcgttgtgctttttaccgcacctttgccgtatccttgaaccggaaacacgggtttccaaacggtcccggacgtttcggacaaaaaaactgcaaataaagtgatgaaccccttttttatttcataaatatgagatgaaagggggttctttttatggcgaaaaaatggcggcagcatttgcaaaactggatgtcacaaaaaatggaccttccgcaggatgtcatgatggacctaccgagaatcacgatgatcggccaaattcatatttatgttgagaaccaccgcggccttttgactttttccgataaagaagtccggctgcttttaaaaaacgggcagctcttaatcaaaggccggtcttttgtcatcaaaacgatcttgcccgaagaaattttattggaaggcaaaatagatgaagtgttgtatttgaacggataggggtggctttggttgaaaaatcattgggtaacttttttacaggggtcggtggctgtaaaaattgagggaaaagggatcgaacgctttatcaaccagctgacaagagccggcctcgctgtttggaatgtcaggcggcagggcaccatggccgtcacgttcgaattgcgcctttcagacattcaccagctcagaaaagcagtaaggggacaagatttgcatgtccgctttttaagggggcgcggcgttccttttttatggaaaaggacgctgaaaaacgccggattcctgttcggcttttttctctttcttgccgtgatcacggtgctttccaacatggtttggggcgtggagatcaaaggcgcaacgccaaaaaccgagcacgaaatccgcaaacaattggacaaactgggcattcaaacagggcattcacagttttttctcgatgatattgaaaccatccagcgcaagctgacaaacaatcttccggacgtgacatgggtcggcgtggagctgcgcgggacaacctatcattttaccgttgtggagaaaaacatgccggaaccggtgaaaaatccgggcccacagcatcttgtcgcttcacagaaagcggtggtggaaaatatgtttgttgaaaaaggcaagccggttgtaaaaattaaccagtatgtcaaaaaaggccagctgcttgtttccggtgtcattgggaatgataaagaaaaataccctgtggcagccaaagggaaagtatacggaaaaacgtggtataaaacggcggttgaacttccgctttcctcccgttttcaagtgtataccggcaatgcagcccaaaaatattatattggaatcggctcgatgaagctgcacatatggggcttccggaccccccgttttaaacagtaccggacatcggaagaagcagaaaaggtcaagtttttaaaatggacattgccggtccgctttatcagggaaacggtccgcgagaaagaagagcgggacagaaattataccaaaaaagaggctgaaacagaagcaaaaaaattagcaaggcaggatttgcgcaaaaaactgccaaaagaagcaaccgttacggatgaatatgttttgcaagaacatgtccgcaatggtacattaaaaatgatgatttattacgaagtagtagaaaatatcgcaatcgcaaaaccaattgctcaaggagacttagaatgacagaagaaagtacggcaaaacttcaattggagaatacaaacgaagcagtgcttttattcggcatttccgaccatcatctgaaaatgctcgaggatgcctacggggtccatatcctcacccgcggcgaaacgatccaggcaagcggcaaagaagatgcggcggaaagggtgatcgccgtcatgtccgaactgcttggtttgattaaaaaaggcatcacgatcagcgggcgcgatgtgctttacgctgtcgaaatggaaaaaaagggccatcttgaatatttgggaagcctgtacgaagaagaaattgcccggaatgcgaaagggaaagcgatccggatcaagacattcgggcagcgcgactatatccaggcgatccgccatcatgaccttgtgttcggcatcggcccggccggaacgggaaaaacgtatttggccgttgtaatggcggtgaatgctttaaaaagcggcgaggtaaaaaggattattttaacccgcccggctgttgaagccggggaaagcctcgggtttttgccgggggatttgaaggaaaaagtcgatccgtatttgcgcccgctctatgatgcattaaacgatgtgctcggcgcggagcacacacagcgcctgattgaaagggaaacaatcgaaattgccccgcttgcctatatgcgcgggcgcacacttgatgatgcgttcgtcattctcgatgaagcgcagaatacgacacaggcacaaatgaaaatgtttctgacccgcctcggttttcactccaaaatggtgattacaggggacagaacgcagattgacctgccaaaaggcgcggaatccggccttttgacagctgaaagagtgctggagaaagtccgcggcatttcgttcgtctatctggaagaaagcgatgtcgtccgccacccgcttgttgcgaaaattatcgaagcttatcaaaacgcataacccgggccgtggcacccgggttgttttgccatgcatttttgccggaaaactgatatgatggaaccgttaagagcgattgcaaaaggcggtgtatgaaaagcaaatgaaaattcccgggcaaatgggcaggttgcggatgatgttaagctttaaatgattcgtgatcctgtttttactggcccttattttattcggcattttttatccgaacattaggccccagacgtatgatatcaaactgttttcagttgcgaacaatacaatccgttctccgaaaacggtcatcgacgaagaaaaaacaaaagaagaaaaacagctggcggccgctagtgttgcgaaagtctatacgtttgacagcggcccggcacaaaaccggcttgtcatggccggcctgattcttgtcattgcccttgcgttaatgaagatggcagggatcttgacccatcttgagattccgggcatcgagtacgcctatccggctgcaatggtgccgctgctcgcccggattttgctcagggaccgttccgcctttttgctttcagccctgcttgccgcttgtgcgagcatcgaatttcacggtgacattgcagatacatttaacgccgagatggttgtatacgcacttattacagggacaggaggcattttgcttttgccgaaacgaccggagcacgcgtttgtttaaaaccgggatttttgcagcgctattgaatgtgcttgcggtaggtgccatctattttttgaatgccggccagatcgtaaagatggactttttatataccctttcatttgcgtttctttccggcattttgtccgccgtgcttgtgatggggttgcagcctttttttgaagcggcgttcggcattttgtcgccgatccgccatgtggagctgtccaatccgaaccacccgcttttgaagaagattttgacggaagcaccgggcacgtatcaccatagcctgatggttgacaatcttgccgaagcggcttgtgaagcgatcggggcgaatggtctccttgccagggtcggcagctattatcatgatattgggaaaacaaaacggccgcatttttttatcgaaaatcagctgaatatcccgaatccgcatgaccgcctttcgcctgaaacaagcagggatattatcattgcccatgcaaaagacggggcagaaacattgaaaaaatataagctgccgaaagctttttcggatattgccgaacagcatcacggcacgactttgctgaagtatttttaccataaagcaaaagcgcaaaacccggatgtgaaagaagaagcgttccgttacccgggcccgaagccgcagacgaaagaagcggctgtcatcaacattgcggacagcgtggaagcggctgtccgatccatgaaccatctgacgcccgatgacattcaaaatttagtcggcaatatcgtgcaagggcgcattatggatgggcaatttaatgaatgtgacattaccctgaaagaactggagaccgttaaacgcacgctttgcgagacgcttaacggcatctttcattcaaggatccagtatccgaaataagggtatcccgtaaaaataacgaaaaaggatggctgacatgacattatcactcgatatgatggatgaaacaaatgagctgaaagcggagcatctcgagcttgtccggacattgctcgattatgcagcccggcaggaaggggtggaggacggcaccgagttgtcggtaacttttacggataatgaagggatccgcgaaatcaaccgcgattaccgcggcaaagaccagccgaccgatgtcatttcgttcgcgcttgaagaaatgggggaaggggagatcgaaattaccggtgcagaaatgccacgcgtgctcggggatattatcatttccgtgccgcgggcaagggagcaggcaggagagtacgggcattcgtttgaaagggaactcggctttttggcggttcacggatttcttcacctgctcggctatgaccatatgacaaaagaagatgaaacggaaatgttcgggcgccaaaacgagatcctcgatcgctatggacttaaacgataaaaaaatcccgaaataccgcacccctttccggccggctgtggaggggctgtttgcaaccatccggcaggaacggaatttccgttttcatcttctggcggcgttatgcgcttgtttgctcggatttttcttctccctttccaaaacagagtggatcgccattttattttccattttcggcgtgattgcaatggagctgatgaacacagcaattgagcgggcggttgaccttaccgtggggcataaataccatccgcttgccaagcttgcgaaagatgcagcggcggcggcggtcctgatgtgggccgtgcttgcggccattatcggctgcatcgtatttcttccaaaattatggcatgtattccagggagcggctttttaatgcggcttcttttttatggcccgcttctccccacctgaaaaagcagatggcggatccggccgggctgccgtacagttaggggcgccaacgggatctgccgcaatttgaaaggcgcaggccgttgcgctaaaataaaggtaatcgcattgcttgaaaacggccatggcatgcaagtgacgctaaaatcagtgcaaacacgccacgagtcgacaatattttcacgaacctttaaaatattcaaaagtaatgaaaaatacattttaacttttggtcatatttgtagtaaaatataggtaaggggaaaagatatggaaacaatggtaaagctgctttcgggcgcttattcaacggaggatttgcatggaacaaccaacatataaatcaggctttatttctatcattggacgcccgaatgtcgggaagtccactttcatcaaccaggtggtcgggcaaaaaatcgccatcatgagcgataagccgcagaccacaaggaataagatacagggcgtttacacagctgatgatgcacagatgatttttattgatacacctggcattcataaaccgaagcataagcttggcgacttcatggtaaaatcagccacggacacattaaaagaagtggacctgattttatttatggtcaatgcggaagaaaaacgcggccgcggcgacgagtacattatcgacctgcttaaacacgtgcgcacgcctgtttttttggtcatcaacaaaattgacctcgtccatccggatgatttgcttgcctttattgaacagtacaaagatttatacccgttccgtgaagtggtcccgatttccgcgctcggaggaaataacgtcggccggctgctcggtgccatcaaggaatatttgccggaagggccgcagtattatccggcggaccaggtgacggaccatccggaacggttcatcatttcggaactgatccgcgaaaaagcattgcagcttacaagagaagaagtgccgcattcgattgcagttgtcattgagaaaatagagcaggcggagaacaaggatgtcatccgcgtgatggcgacgatcgttgtcgaacggccgtcccaaaaggggattatcatcggcaggcagggaagtatgttgaaagagatcggcaaaagagcaagggctgatattgaaaatttgctcgggtcgcaagtttatttggaattatgggtaaaagtgcagaaagattggcggaataaaatcagccagctgcgcgatttcggtttccgggaagacgaatattgattttggcgcccgcttttggttgtaaatttttaccccgaatgtttgcatgtcccctggtgaagctattaaagacttttaatgaaatttcatgacctacaacatgaaaggcgtggtgaatatgttagaatttacctggaaagtctttgcggataccggcaatattgatacgtacctgctttttaaggaactggaaagggaccggcgccaggaccggtatgaacgtgacgaagatccggcagatgcggatttttccattatttaaggatatgccgcactgcctgccgggcaagaggtggagaggttgtttgaaaaatgtgaagggatcgtcattaaaaataccgactacggcgaatccaataaaatcctgcatatttacacgagagaatttgggaagctgggctttatggcgcgcggagccaaaaagccgaacagccggctggctgcggtttcccaggtttttacatatgggaatttcctttttcagccgtcgcgcggccttgccacccttcagcagggagaggccgtctcaccgatgcgccatatccgcgaagatatttttaaaacggcgtatgccgcctatgtggtggaacttttaggccgggcggttgaagatagaaaaaagaatccgtttgtgttcgaacttttgctccggacactcgaatatattgatgaaggctatgacccggaaattatcagggacatctttgaaatgaagatgctgaatgtgctcggcatgtacccggtgatggaccgatgtgcggtatgcggaaacacggaagggccctttgcgttttccatccgggaaaatggccttctttgccaccgctgttttgcgcgcgacccgtaccggcttccgttgccacagccggttatccgcctgctccggcttttttattttctggacatcaaccggctcggtagcatttctgtcaaagactcgacaaaaaaagaactgagaacggccatttccatgtattatgatgaatataccggcctgcaattgaaagccggccggtttctcaaccagatagaggcgcttgaaaaaaagcttgggccggacaatgcataaggcttccccgtatagaagggaaaaggagggctctcctttctgcccagggctggatgatgcatcatgcacggcccgcggtttggtttcaaactgtttttgcctggccgtaaaatgcatgacccgctattggagtatacgcagctgtcttccgaaatatcaatggcattttgatgtataatgatggtatgtgtaaaattttacnnnnnnnnnnnnnnnnnnnnnnnnnnnnnnnnnnnnnnnnnnnnnnnnnnnnnnnnnnnnnnnnnnnnnnnnnnnnnnnnnnnnnnnnnnnnnnnnnnnnaggtacgagcgaggaggctcgccggccgcccgcggaaagcgagtgaatttcgcgcgcctcaacatccccgttgtccatctttatacggaaatatcacatcttttccgaaaattacaccgagcaagtgaagcacggtagtcgaaagtgtacaaaaagagtgtcttggaatacccgatatttaaaccttgtcgagaaaaacttgacacatactaatgatggcagataaggacagattcctgtaaacgtgttatactattgtcttgcatggttgtgtgaatgaaggcggtgattacgatcgaattaacgaaaaggcaggaacagattctcgagatcgtcaaaacgaacgggccgattacaggcgagcacatcgccgaaaagctgaatttaacgcgggcaacgctccggccggatcttgctattttgacaatggcaggttatttggatgcacgcccgcgcgtcggctatttttataccggaaaaacgagcacgcagcttcttacggaaaatttaaaacatatttacgtaaaagattaccagtctctgccggtcgtggttaacgagaatatgtccgtgtacgatgccatcgtaacggtttttcttgaagatgtcggcacgctttatgtcgtcgacaatgcatcccatctgatcggtgttctgtcgcggaaagatttgttgcgggcaagccttggaaacaaagacttatccgcattgccggtgcatatcattatgacaagaatgccgaatattacctgctgcaaaaaagatgatcttctggttgatgtggcaaaaaaactgattgaaaaacaaattgactcggtgccggttgtgaaagaaacagaaaccgggcttgaagtgaccggacggataacgaaaacgaatatcacgaaagcattcgttgaacttgcagacggcgattaaaaaggaagtgatcacttttggcaaaaccctatatttacattgtttcagactcggtcggagagacggcggagctcgtcacaaaggcggccatcagccagtttgaaaaccaggacgcagaattaaaacgcttcccgtatgtggaagatacgatccatattgatgaagtggtttcgcttgcatctatgaattacggcatgatcgtttatacgcttgtgaagccggaaatgcggaaatacatgaatgaccaagccgtaaaacacggccttgctgctgtcgatttaatgggacctctcatggaccggctgctcgaattgtatgaatccaaaccgctctatgaaccggggctcgtcagaaaattggacgaagcttattttaaaaaggtggaagcaatcgaatttgcggtgaaatatgatgacggccgggatccgcgcggcattgtccgggcggatattgtcctgatcggtgtttcccgtacatccaaaacgccgctttcacaatacctggcgcatcaccactataaagttgcgaatgtgccgattgtgccggaagtggatccgccggaagaactttttcgtattccttccaaaaagtgtatcggtttaaaaattgatcccgacacattgaatcatatccggaaagaacggctgaaaacactcgggcttgatggttcggcaagttatgcgaccattgagcgcatcaaatatgaactggattattttaaccagatagcggagcggcttgactgcaaagtgattgatgttaccaacaaagcggttgaagaaacggcaaatattattatggatgaaatgagaaattaaaagcggccaaaggcgcggggagcgcgcgcctttttcgcggcatcggccggatgaaaataaaccatttgaaacgggggaagcaggctaaaacggtctttgtttccgcccgtttttttagaattttcttttgaaaaaacgaggcatatttttttctgcttttcagtatttatttatagtcaaaatgaagcaagtgtactataataaaaaattgtgataaaaatgtatgatacgggtttagagtaggctattagggaataaactatttatagtaaatgtcaagtctgaatttgaataaatttcgacagggccaaaaaaattatgggaagaagcgcaaaacatgcaggattctgtggagcgatgtagaatatttgatgtagaatattttaggatgaaaagaaaaacagcaaacgaaagcatgcattgcccgcatcccggatgaaatgctgttgaataaaggtggagcagaagggattgtttgatgacagggatgattccgaatgaaaaaattgatgaaatccgccggtcttccgatattgtggaggtcgtgagcgattatgtacagctcaaaaaaaagggacgcaattacttcggcctgtgcccgttccacggcgagcatacgccgtcattttccgtatcccccgacaagcagatttttcactgctttggatgcggcgcaggcggcaatgtgtttacttttctcatggatatcgaaggcatctcttttcaggaagcggcagaaaaactggcacaaaaagcgcatatcgagcttggcgtcgttttacggcacgaagagcagaaaaacatcgatccgaagcgccggcagatgctggaagcacacgaactgctacaaaaattataccaccatttgcttttgcatacaaaagaaggggaacctgcgctaaagtaccttcgcgggcgcgggtttacagacgaagcaatcgaaaagttcgggatcgggtatgcgctgcctgcctgggattttgccgccaatatgctgcaaaagcgcggttttcccctttccgtgctggaagaaagcgggcttgtcatccgcaatgaaaaggacggcaaatattttgaccgtttcagggaccggatcatgtttccaatcatggatgaaaagggaaacgtggtagcatttgccggaagagctgtccggaaagaggaacacccgaaatatttgaacagccctgagacgccgctttttaacaaaagcaagctgctttttaacctgaaccgggcaagagggccgatccgcaaaaaacagcaggcggtcatttttgaaggctatgcagacgtgatctccgccgaccgtgctggcgttgaaaacggcattgccacaatgggcacatcgattacagcggaacacgtccggatgataaaaaggctcacggacggcgtcgtcatttgttacgactcggaccaggccggcttcactgcggctttccgtgcagggaaaatgctcagtgaaaacggctgtgaagtgcgggttgcgcaaatgccggacggactggaccctgatgactacataaaccggcatggcggagaaaaattccgcagggatgtaataggggccagcctgacttttatggcttttaaaatgcaatatttccgcatgaataaaaatctccaaaatgaaggagaaaagctggcgtatatagaagaagtcattcaggaaattgccaagctggagaatccggtggagaaagatctttacttgcgccagctgtccgaagaattttcgttgtctttggatgccctgaaagagcaggaaaggcaatacggttcccgtgaaaccggaaaccggaagagaagccggcctgcagggaatccggcgcctgtgcatgaagaagcccggatgctgcctgccaatatgaccgcggagagaaggctgctttggcatatgctgcgggacggggaagttgcctataaagtgaaagatttccttggcgaaaacagcttttacggggacgaacaccaggccatttttacttacctgcttggctggtacgaagaagggaatccgcctgatacgagcgctttcctttcttatttgcccgattcaaaattgcagaggattgctgccgaaatcgaaatgatgacggtaggcggggagctgacggatgaggaattggaagattatgtgcagtatgtactgaaacaccagaaattgttgcgcattcaggaaaaactgagggcacaaaaagatgccgaacggcaaaatgatttccaaaaagcgctgcaattggcgggtgaaatcgtggcactgagaaagtccatgacctgaaatctctgctttttataaatgatcaagctgctgttggatcattgagtgtgttgaaattgtcggaaggaggggaacatatggctgaaaagtcagcacgttccaaagaagtagaagaaagtgagtttacagtggaaaaagcaaaagagcaactcgttgaacgcggaaaaaagcggggggttctcacttatgatgccatttccgaaaaactcggccattttgatttaacatccgaccagatggatgaattttatgaattgctcggcgaacagggcatcgatgtgacagatgaggccggcgacgaggatgcaccttcccatctcgaactggaaaaagagaatgacgaagagtttgacctgaatgatttgagtgttcccccgggtgtgaaaatcaatgatccggtacgcatgtatttgaaagaaatcgggcgggtcgaccttctttccgcagacgaagaaatcgaactggccaaaagaatcgaacagggcgatgaagaggcaaaacgccggctcgctgaagccaacttgcgccttgttgtcagcattgcaaaacggtatgtcggccgcggcatgcagtttctggatttgatccaggaaggcaatatgggcctcatcaaggcggttgaaaaattcgattatcgaaaaggctacaaattcagcacctatgccacatggtggatccgccaagccatcacgcgcgcgattgcagaccaggcgcggacgatccggattccggtccatatggtagaaacgatcaataaactcatccgcgtgcaacggtcactgcttcaggatttaggcagggaaccaacaccggaagaaattgctgaagaaatggatatttctccggataaagtcagggaaatcattaaaatcgcccaggaaccggtttcacttgaaactccgattggcgaagaagatgattcgcatcttggagactttattgaagaccaggatgccacatcgccttctgaccatgccgcttatgagctgctgaaagaacagctggaagatgtgcttgatacattgaccgacagggaagaaaatgtgctccgcctccggttcgggcttgatgacgggcgcacccggacccttgaagaagtcggcaaagtatttggcgtcacaagggaacggatccggcaaattgaagcaaaggctttgcggaaactccgccatccgagcaggagcaaacgcctgaaagatttccttgaataagccggaaaagaaacaggcacggcgcttgtgcatctatttttacaggcgccttgttttcagtttacttcctcgggaagtaaacttttttcttgtaaaaaaaggattttccacccgcctgtcgaataggttacacaggatgtgttgaaaaatggacgataagagaaaacaaatcattgtcaacgaaattaaaatgtggaaagagaccaaaatgattccacaagaatactgcgattttctgctcgcgatctatacggagggaactgaaggcaatacccgcaaacaaaacggcgcagggaaatccgttaaaaaacaagctgcggtttctgctttcattcttgcactcgttgcaatcgctgtatttgtcatttattttactgaattacattttattttgcaaacagggattttgacagcttttgtcggatgcttactttttctgggaattcattatgctaataaagaaattttttacccggttttctttgttggcgctgcgcttattttgcttcttttcagtgtgtttttgaatgaaaagttatttggaaatcaccgctatactttatatttgctgctttttgccaactgcgggctctggcttgccgccggaaaggcatacaaactgctgtattttaccctgtcggggcttctcggtcttgccatcttgctggtctctattgtaatataatatataattttcagttttcctgctgcttttttccggctgccagcaattgtatcattttattgaattttttgccgcttttattataatacaagatgaaagcgcattcaaggtgttatttttgaatgggaaggctttctttcgaaagaattttcagttaaaatgaaagagatgggcgcggtaaatacgctggagaagcggaaaaacaagggggggaacgcattgaaaagaaatcctgtcatcccatatgtgctgattatggcattcgggcttgcccttatcttttttctttccgtgaaagggatcggggatgcgaaggaagtggccaaagaaaaggagcatccaaagcaaaccgaaaccgcttcctcggaaaagtttgatccggagagctttgccaaaaagacttgcgtgacctgccacgggaacaatttgcaaggcggggccgggccgaatctccatggcatcggcaagaaattgcccaaagataagattaaagatgtactcaggaacggcacgagcggtggcatgccggccggacttgtcgaagaggaccatattgatgaaatggcggactgggtatcaaagctaaaataagaggcaggttcgccgtacggggggcatcccccttttttttatggcaaaaagtggctacaatagaagtatcacatgtaaagtggtgaagaaatgaacagtgggaaactttcaaaaaggcttgagtcggtggcggcttttattccggccggcactgtattggcagatatcgggtctgatcacgcttatttgcccgtattttgcgtgaagtgcggcagcgtagcagaggcggttgccggggaagtggcggaagggccgtatcattcggcgcaaaaacaagtggaaaaagcagggctggccggaaaaatcagcgtccggaaaggagacgggcttgaaatcctggctccaggggaagcggggtgcattacgattgccgggatgggcggcgcgttaattgcctccatccttgatcgcggaaaagcaaaactaaacggcaaagaaacgctcatcctgcagccgaataccggatcgcacattgtccgcggatggctggcggaaaacggatgggccattacaggagaagacattctcgaggaagacggaaaaatatatgaaattattgcagcagaatatgcgggcgcgcttgtggcgctcacggaagcggaacgcctggtgggcccggttttaatcaaaaaccaaaatgaagctttccggaaaaaatggcgcaatgaaatcaaaaaatggcaatccgtgctcagccatctggagcaggcaggcgcaagcccggaaattgaagaaaaaaagggcgtctatcgccatttgattgctttggtagaggaggttttaacatgaagcatgcgaacgggcatgatgtcatccagctatttgagcagtttgcaccgaaaaagtttgcaatggacggggatccggtcgggctccaaatcgggcagttaaacgggccggtgaaaaatgtgctggtggcgcttgatgttttggaagatgtggtggatgaagcgattgaaaaggatgcccagctgattatcgcccaccatcctgccgtttaccggccgttaaaaaacatggcgacggataccccccaggggcggctgattgaaaaatgcatcagccacgggattgctgtatatgccgcccatacaaaccttgatattgcagaagggggcgtgaacgacttgctggcggaggcgctagggctccgtgatacggaagtattatcgcctctttttgaagacaaattgaggaaactggttgtttttgtcccggtatcccatgaagaggctgtaagaacggcgcttgggaatgccggcgcgggggcgatcgggaattacagccattgttctttctccgcccgcggtaccggccgttttctgccggggaaagggacaaacccgttcctcggggaagcgggcaaactcgaggcagcaagtgaaacaagggttgaaacgatttatcccgcatcgattgaaaaacaggtgctcgccagcatgtttgaggcgcacccgtatgaagaggttgcctatgatatttatccggtcgtaaatgaaggccggaagttcgggctaggccggatcggcgaaatcgaacgggaaatggcactgcgggaatttgcggaacatgtaaaaaaaacgctcgaagttccggcattgcgcgtcgtcggaaatttggacgaaaaagtgaaaaaagtggctgttctcggcggagacggcaacaaatattttgctgaggcaaaaagggcgggggccgatgtgtttgtcaccggggatttttattaccataacgcccacgatgcactggcgctcgggctgaatgtcgtagaccccgggcataacgtggagaaggtgatgaaaaaaggggttgcggcctatatgcgaaaagcatgcagggagcatcagctcgatgtccgctttattgcatccgaagtaaacacagacccgtttcagtttctttaagaaaacgccggggccgctgaaagcagggaaaaggcggccttttttaacccgggccgcgttatcctttaaagattgcgatggctcattttcattctttttgccggtgccccgttgcatcccgtatggatgccttcctgaaaatacgtgccaacgggtattcattttcattccggtgctgcagtcgttccagcatggatagttaaaggcaaaagggcggatgcccaccggactccgcccttttgcctttattacttttccggccggaagcgttccaaccgggtttttatgctttttggccggaagaagggtgcggcgctttgactttcggcaaaattttgtttaatggtacgttccgctttcgttcccaggttgattcgtcttccgggtcgaatttctcaagaaatgcaatgacttcacgcacgatcggcgtcggcgtcgatgcccctgccgttacggcaactttttgtacaccttcaagccatgccagctcaatttcttcgacatcggcaatccggtatgcttttgtgccggcgatttcttccgatacttgcgcgaggcggtttgaattgttgctgcgcgggtcgccgactacaagcagcaaatcggcctccccggcctgcctggcaacggcttcctggcgaatttgcgtggcatggcagatttcattgtacgtttccgcatgcgggtatttcttttggatgtgttccatcaaatccgccacgtcccattggctcatcgtcgtctggtttgttacaataattttatcattgcggatatcgagggcttccacgtctgcttccgtttcgacgagatggacaatcgcgggtgcgacaccggctgccccctcgggttccggatggcctttttttccgatataaatgacatcatagccttctttttctttttcgcggattaaatcatgggttttcgccacgtccgggcatgtggcatcaatggccgtcaagcctttttttcgggcaagttcgcgcacttcgggggagacgccgtgcgcggtaaaaataacggtgcctttttccaccttttcgagaatttctttgcggtttttgccgtcgagcgtaaggatcccgtcttctttaaaggcatccgtcacatgctggttgtggacgatcatgccaaggatatagatgggacgcggcaaagttttatccattgcggcgttgcgggcaatgaccattgcgtcaacaacgccgtagcagtaacccctgggggaaattttcagcacttccatcgcgatcctcctaacagggtgccggaacgccggcatccgggctgggaaatgagtctattacatttgtattatatcggaatgcggcaaagaatacaaaacgggtttttgcacagccggccgtgcctgaaatagggcgcgcttccccggaaggatggaaacgcacgggccggtgccagcttttaatagaaaaaaccgtctgcacgcgggtacaaacggttttggcgtcttaaataaacaattttggcacggaagcccctttttccgggcgtttttcgccatttgtgctttctgcgggttgagatgatgcgttacgacccgcctgccggttgctttttttctcttttgccggttcagtttttttctctttgctgcttaattcgcggttctcctgcccctcctcttccggggcatttttcaggccgcggtacaatttccacatcgccggcagatttttgacgagcgggccgacctgctggatctgctggatcatcgggccgacctgttgcgcggttttcaggacgttttgtgtattgtttaaaaacgaactgatcgaagaaggatttgtgatggatttgaaaagtgatccgcctcccccggcggtaccccgctggaaggcggctgccgggttggcggctgctgtttgcccgcccctttggaacagtctggataaaaaccctccgccccgtcctgcagttgcgcccgctcggcccggaaatcccggcatttgccctccggctctgaattgcccgggcatgcccggcccgcccaggcggttcccggcaaacagactacgctgcattccgccgaacgggggcgggttttgccggccgaaaaccggcggcatatttcttggcggcatccatttgaccccctttctgtttggcttttgcgttcaatattacaatatgcaggccaaacggaaacgtctggcatgcaaaaaaagtttctttctgcccgtaaacggcacaaaaatttccatttgcataccggggcatgcggaaattggcatttttctcggatgttgattataataacaagacgttctgctgcatgagagaaggagtggaaacatgaacggaacaaaatggaaagatttcggttttaaaccatttatcgaaaaagcgatcgaacataaaggctttgccgaaccgacggaaatacagcgaaaaatgatcccgcttgttttgcgtggggaaagtgccattggacagtcgcagacgggaacggggaaaacacatgcttatgtgctaccgctcttgcaaaaaacagacccgtctcttgcggaagtccaggcggtgattacggccccgacgcgggaactggcggcacagatttaccatgaaattcaggaagtattaaaatgggaagaaacaggccggataaccgccaaactgtttatcggcggaacggacaagcagcgtgatatcagcaaactgaaaaaacagccgcaaattgtagtcggcacgccgggcagggtgaatgatcttgtgaaagagcaggcgttgtttgtccatacagcaaaaacgtttgttgtcgatgaagcggatattatgctcgatatgggctttatcgtggatgtcgaccaaattgcggggaggatgcctgaaaaactgcaaatgctcgtgttttcggcaaccattcccgaaaaattaaagccgtttttaaaaaagtatatggaaaatccgaaattcgagcaggtagcgccgcggcaaatcgcagcagaaaaaattgaacatattctgatcccgaaacgcgcgcgggagaaaattgacgtgttgcatgatgccctcgaggcgtttaacccgtacttggcgattgtatttgcaaacacaaaagcgatggtggaagaaattgctgcagggctctcggcaaaagggatgaaaacggcccgtatccacggagacctctcgccgcgggaacgggcgaaaacgatgaaacaaatcaaaaacctggaataccggtatatcattgccactgatctggccgcgcgcgggattgatatcgaaggggtcagccatgtcgtaaactacgagctgccaaaagatttgacgttttacgtccaccgcgccggcagaacggcccgcgccgatctatcgggcatatgcgcaaccatttacgaaccttccgatgagtttgccctcacgcagcttgagaaaatggggattgccttcatctaccgtgatgtgcgccgcggcgaatgggtggaactgggcgaccggaaccgccgcaaaaagcgtgtgaaaaaagcggataaaacggaaaccgcggcgagaaaggcaatcggcaggccgaaaaaagtgaagccgggctataaaaagaaaatggaacggcagatcgaaatgctgaaaaaacggcaaaggaaattgcaaaaacggaaataaaaggggagaaacaccatgcttaaaattggttcacatgtctcgatgagcggcaaaaaaatgctgcttgcgtcaagtgaagaggcggtttcatacggcgccaacacatttatgatttataccggcgcaccgcaaaatacaaggcggaagaaaattgaagacttgaacattgaagcaggccttgcccatatgaaagaacatggcatagaggagattgtcgtccatgcgccgtatattatcaatatcggcaacacaacaaatcctgcgacatttgaactcggtgtccgttttttgcagtcggaaattgagcggacggaggcaatcggggcgaagcagatcgttttgcatccgggcgcccatgttggagcagggccggaaaaagcgatcaagaaaatcattgaagggctgaatgaggtgctcgttccggggcaaaccgcccagattgcgcttgaaacgatggccggcaaaggatccgaatgcggcaggacgtttgaggaactggcggaaatcatagacggcgtcaaatacaatgacaagctttccatttgctttgacacttgccatacccatgatgccggctatgatgtgaaaaaccggtttgatgaagtgctggatgaatttgaccggatcatcggcatcggtcgcctgaaagtactgcatatcaatgacagcaaaaatgaagccggctcgcacaaagaccggcatgagaatatcgggtttggccatatcggatttgaagcccttgactatatcgtgcatcacccggcgcttcaggacatcccgaaaattttggaaaccccttatgtcggcgaagacaaaaagaaccgcaagcccccgtacaaatacgaaatcgccatgcttagaaacagggaatttgacgaaaatctgctggccaaaattgtggaacagcccgtttgaatcccggccgggttttaaagccgctgaaaaaggccaaataaaaacataaaaacggcgggacaccaccattcatcgtgccccgctgtttttttgcatctataccgtttcaaagcttttggttttgcctggatttgttaaaaataaacctccattttcaaaatgaaataaaactgtaatctatttgccaaagaatgaatgatataatcagaaatatcaatagattaatagaacgggagcttcacataatggggaaaagccggtacatagcaatggaggcgttaaggtgaacaggaagtttttgtcgttaaccgctgctgcatttatcgcaggcagcgctttcgtcccgcttagcaaagcatccgcagaaaccgctgccaaaagcattcaaaacgaggagtcggccgtgcaggaaagcatttccggcaagcaaaacgagattgcgaagattgcagaaaacgagaaacagcttcagtcggatatggataaaatttcggctaagatccgccagaccaatcagaaaatcagtgaaaaaacgcaggaagtgtcaaatgcgcatgacgaagttgcatcgttaaatgcaaaaatgaaagaaacgcaaaaaagaatagaagaacgcaacaacgtacttgcccgacgtgcgcgtgacattcagcaaaacggcgggctggacagttacctgaatgtgctgcttgaatccggcagcctgagcgattttgtcagccgagcagcggcgttaacgacgtttgtccaagcagaccgcgccattttaaaagcgcaggaaaaagacagccaaacattaaatgcagcaaaagctgaagtggaaaagaagcttcagaaagtgcagtcggatttatccgagctgcaggagctgaaagaagaaaacaaataccggtttgcagaccagaaaagcctgaaagcagcgctcaaggagcaaaaacaggctgttgcagctgagttggccaggctgaaagacaaagaagcttccttaaacgcagaggaaaaagcagcgctcgctgaacttgaaagcaagcaggccgcggccgcgccatctgatgcggcaaaaccttccgctcctcaagaccgggagcaagaggattccgcctcttccggcacgggcgccggaagaggcccggatggttcaaacggaaaaaccgcggcacatacacagaaggaaaaggcaaagcccggatcccgcgcaaaacatgttgcgcgcgtatcttccttttctgattccggccgctcttcaaataacgcttccggaacggttgaaaaagcgatcagcgccggttcggctttaatcgggcatacctcctataaaatgggcggcggaaggacgaaaagcgacattgcaaacgggatttttgactgctcctcctttgttcattgggcatatgcgcaggtaggcgtggatctgggcggctccggcgcgaatacggatacgcttgccggtcttggacaggtggttagtgcttcgcaaatgaaacggggggacctcgtcttctttgatacttataagtacaacggccatgtcggcatttacctgggcggcggcaaatttcttgattgcaacagttcagatggcgtttccattgacaacatgagcagcggctactggaaaaagtgctttaatggcgttgtcaggcgtgtagttaaataaggaagaaccggccgaaaagctgtttttcggccggttcttttctattttgccaataagacaaacacccggttgatttcttttgcggtgagcgggctcgtaatttttgcaatgtccttcagcgctttgctgcgggcctggtcatcaaagatgtccaattgttttccccgcacataatccgcgattttttccgcatcttcgcggctgattttcacgttaaactgccgcgcgtatttaaaaagttccgcgccggtaatgatattcaccttataattgaccatattttgaatcagtttcaatatccatcactctccccgtttcatgtatatgcgggccgggaagaaatgtttcggatggggcattgcgccggaagcagaaaagcggcaagaaggcggcaaccgccggcatttcaccgcgaaccgccaccctttacaatcttccggaaagcgggtataatgtttaaatcggaatgattctgattgaggagttgcgtatggaagaatacattgtggaagtttcaggcctctctttccgttatgaccggaagaatgtgctggaacagatcgatttaaacataccaaagggagcgtttctcggcatcattggcccgaacggttccggaaaatcaacactgttaaagctcatgctcgggctgttaaaaccgcaggaaggggaaatccgccttttcggcacgccgctcagccgctttaaagactggagccggatcggttttgtttcgcaaaaagccaatgcatttaataccggttatcctgcgactgttttggaagtggtcgaaagcggcctggtgaaaaaaaccggcctgttccgcttccttggccccagcgccagaaaggaagcaatggaagcgatccgctcagtcgggatggaggcgtacgcccatcaaaatattggcgagctaagcggcggccagcagcagcgtgtgtttatcgcgcgggccattgtcagcaagccggagattttgatgctggatgagccgacagtcggtgtggaccagcaccatgtccggtctttttacgaaatgctggagcggctgaacagggaatggggcattaccctgattcttgtcacacatgatatcgacgccgtttccgacgaggtgacgcatgttgcgtgcctaaaccagcatttatacttccatggcgacatccacgcgtttcagcaactggatgaagaaaaacgttcattctggtacgcccgcgatgcccggttgctggcacatgaatatgggtgagaaggagaaaccgaatgattgctgcactttttcattatcactttttgcaaaatacatttttggccgggattttaatcggccttattgcccctttgatcggcagttttattgtcgtgcgccgtttgtcgctgattgcggacgcgctcagccatgtcacattgtccgggattgctgtcagcctgtttttaagcagcaagcttcctgttcttgccgggctgaacccgctttatatcggcaccggcttttccgtgctcggatccgtgctgatcgagcggctgcgcggggtttaccggcattatgaagaacttgcgattccgattatcatgtcgggcgggattggcatcgggctgatctttatttctgtggccggcgggtataatgtagatttgatgaattacctgttcggcagcgtaagcgcggtaagccgggctgatctttggctcattctggggattgccgtcattgtggcggctgtgatccttttgctgtacaaggaacttttcctgctttcttttgatgaggaatatgctaaagtgtccggcatccctgcgaaaacgatccacctgctgtttatggtgctgattgcgcttgtaatttcggccgcgatgcggatcgtggggattatgcttgtatctgcgctgattacgctcccggtagcggccagcatccgcatcagccggggatttaaacagaccattttgttttccgttctttttggtgaaatttccgttttgggcgggctggtcacggcgttttatctgaatttgccgcccggcggtacaattgtggtgatttccatcgctattttgcttttggcggtttatatgaaacgattccggcctggtgccggtttgaacaaaatgaaggtgtgaacatgcttttggatgaggcaattgaaatcttgaaggaaaacggctataagcatacaggaaaaagagaaaaaatgctcgatttgttttcggagagcaataagtatttgacggcaaaagacgtgctcgtgtggatgaaagatgattatccgggcctcagttttgacacgatttacaggaatttatcgctttttgccgaacttggcattctggaagtgacagagctgtccggtgaaaagcatttccgtttcaaatgctcgacaaaccaccaccatcaccattttatttgcttggcgtgcgggaagacgaaagaaatcccggattgcccgatgccgacggtcagcggtttggaagggtatgccatttccggccataagtttgaaatttacggcacgtgcccggaatgcatggcggatgaaacgcggcaaaatatttaacaaaccctgcttccggcagggtttgttaaatacttggaaattttcacacatgcattttcaagaaataagccaagcgggcggcgcacaggtcacccgcaaaaagcgcacccccaatccggcctgccccttacagaaagaaggagccctttaatcgtgtgcggcgcggccggattgggtgatccagcgcctgacccagtcgtccgcttctttccagtttttcacccggtacacattttccgggacgggatcccggttgtacggggtgtcaaacagaaggacggggatgccaagggtctgtgcaatggcagccgcattgtcatgtttgtcttccaaaaacagatcaacgctgtatttttttgcggtttccactttatgatgcgtgccgatcagctcgatatgatggtatttcagctgttgttttgtaaaccagtttttggtcacatcaagcagatgggatgcgcgtgcactgataaaatacagctcaaaccggtctgcccatttgtttaacacttcttttgccccttttgccaccggggattttgcatagatcacaggctccgaccggataaaccagtcggcaaatgtcccggcaggaatatcgacgacatctgtgatctcatacttcgttaagtcttcatatttcaggccaatgtgaaaggcatcgttaatgaacggaataagcgtttcagggtctgtcacagtcccgtcaatgtcaatgccgaaacggtattttttcaccatggtgcgcctcctttgtgttttgaatgtgaagcgatcgtgctgcctgttacccgggcccgtttgcaagggccgggccggcaggataaacattgccgcgcatgaagaaacaccggcttgttttacgccggtgtttcggtcagacggggttcgcgttttgcgcagcctgtttttggtaatacgcttcggcaagcatgtcgatttcttttttcagttcttccaccatttgatcttccggcactttccgtatgattttccctttgcggaacaggaggccttccccgcgtgcgccggcgatgccgatatccgcttctcttgcttcgccggggccgttgacggcgcagccgaggactgaaactttaatcggcgctttaatggtctgtaaatattcttcgacttcgtttgcgatgctgatcaaatcgatcgcaatccggccgcaagtcgggcatgaaacgagcgttggggcattggaggaaagcccgaatattttcagcagctcgcgcgcgactttcacttcttccaccgggtcggcgcttaaagaaatgcggagcgtgttgccgattcccatatttaaaagcgccccaatccctgcggcacttttgatggtgccggaaaacagcgtcccggattcggtaatgccgagatggagcgggtagtcaaatgtccttgccgctttctcgtacgcttcgatggcaaggcggacgtccgaggctttcatggaaacgataatgtcgtgaaaatccaggtcttcgagaatccggatatggtgcagggcgctttcgaccatgccgtctgctgtagggtatccgtatttttgcaaaattggtttttcaaggcttcctgcattgacgccgatccggattgggatgccgcgctcttttgccgctttcacgaccgcttcgactttttcacgcttgccgatattgcccggattaatccggattttatcgacgccgccttcaatcgcgattaacgcaagccggtaatcaaagtggatatccgcgacaagcgggatatggattcttttttttatgtcgggaatagcccttgccgcccgttcatccgggacagcaacgcgcacgatctggcagcctgcttcttcaagccgctcaatctggcggacggttgcatcggcatcatgtgttttcgtcgtcgtcatactttgaatgaatagttcattgctgcccccgatcgtcaagtttccgaccttgacagggcgcgtttttgtacggtgtatgatctcacccaaggatattcgctcctttaatgatctgtcagtccataaacattttaccaacttacattttaacaattgactgccccgattgacaagccattgtccgcattttaccgggattcgccgtaaatgggaaaccggtacgtttgtccgatctggatgtcttccggtgcaattccgccgttcagtttgctgaaatcacggatcgctttttcaatcgaaggcgccggcccgcccgatatttgtttgataatcgtaagcaccgtgtcaccggaatggactttggctgtgacatacgggcggtgcgttgtttgcggttgtacggcaacggtttttccggctgtttcttttgcattcgtcgggattgtgcctgcgtggagatcgtagtagatgcagtaagagataagggcagcgaaaaagagcacagcgatttttttcaacatggacattccctcctttatgagtgctaccagtatatgccggtattctgcaattagaacccggggggattcagaaaaatgcaggcgtaaaatttgccatctatcaaccggttttggtacattaaatatgacaaatatttgaatctttccggttcaaaacattacataaaggaggaataaagatatgacgtacactttaccgcaattgccgtatgcgtatgatgcactggagccttatattgacaaggaaacgatgaacatccaccatacgaagcaccataatacttatgtcaccaacttgaacaaagcgctggaaggccatgacgatcttgcttccaaatccgttgaggacttaatttcggatttgaatgcggttccggaagaaatccgtacagcggttcgcaacaacggcggggggcatgccaaccactcgctgttctggacgctgctttcgccaaatggcggcggcgaacctaaaggcgcgctgcttgacgcgatcaacagcaaattcggcagctttgaaaaattcaaagaacaatttgcagctgctgcagcaggccgtttcggttccggctgggcatggcttgttgtccataacggcgagctcgaaattatgagcaccccgaaccaggacagcccgctttccgaaggcaaaaaaccggttcttggccttgatgtttgggaacatgcttactatttgaaataccaaaaccgccgtccggaatatatttctgcattctggaatgttgtaaactgggacgaagtggaaaaactgtacgaagcagcgaaataatcgcgatccatttaaaaaagggcgtgccgcgcaatttgcgtgcacgccctttttgcatgcacccgtgcataaacgcccccgtttttcaaaacaatataggggaatggggggagttttgatttatgaagcgtgtgcaaaaatggttcggagatatagaactgtcaaaagatctgctgctgctgcttgcgatcggcgggctttattctttaagcgtttcgctgtccaattctttcgttaacatatatttatggaagcagacagggaagtacatagatctggcggtatataatttatcggttgtcatcctgcagccgctcacttttatcattgcgggaagatgggcaaaaaaagtggacagggtcatggtgttcaggatcggggttgcctttttggcgctgttttatttatgcgtgctgttttcgcgggggcatgccggcgattttatcgttttgcttggcgggctgctcggtatcggctacggcttttactggctcgcctacaatgtactgacgtttgaaattacggagcctgagacgagggatttttttaacggctttatgggggcattcggttccatcggcggcatggccgggccgtttgccgcagggctgatcatttcagcaatcggaaaaaccggttatacggtcgtttttgccctctccctgatcctgtttgcccttgccgtcgtcctcagtttttttattgcgccgcgccctgcacacggccgttatttgtttaagcaaatcgtaaaggaacgacaccgcaacccgaattggaaacggattacaagcgcccattttgtccaaggtttaagggatggcacgtttgtgtttatgatttccgttttcgtgttcctttctacggggagcgagctttctctcggcacgttcgggctgatcaattcttgcctgcagtttctcgggtacacgctcgttgcccgttatattaaaatcaagcaccgccagcgctcgatttttttgggcgggctgcttctgtatgcggccgtgtttttgtttgtttttgaagtcacctatccgagaatgctgctttatgccgcaacgattgcgattgcttacccgcttctgcttgtcccgtataattcgatgacatacgatgtgatcggcagggcatggaaagcagcggaagcacggattgagtatgttgtcgtgcttgaaatatttaccaatgccggcagagttgcttcaattttacttttcattgcagccgtcacttttttcaacagccaggtgagcatccgcgtgctgatgctagtcattggggcagggcatttgtgcatttcgctttttacaaggaatatccggattggggatatgtagggccgccgtttccaaaaatggcggtattttttatagccatgtccgcattttttcgctaaaatggaatgtatagccgatggcgaagggaggagcagaaaaaggttgaaaaaaaagaagcggaaaaagcggtcgcatattccatttagaatgaatatgctgttctttgctgtttttgtgcttttttcggtcttagtcgtgcgtctgggcattgtgcagattgtctacggccaggattacaaaaaagaacttgaacagacggaagacaagacgatccatacttctgttccaagaggaagaattcttgaccggaactataaagtgattgtgggcaataaagcgctgaaggcgatcacatatacgagaacccaggcggatgacaacaaaaaaatgctgaaagtggcaaggaaactcggggaaatcatcaaagtgccggatgcggatgtgaaacggctgacggaccgggataaaaaagacttttggatcctgacccatccgaaagcggcaaagcagctcgtttccaaagcagaacaggcaaagctcgacaacgacagcgacaaaatatacaagttgcagctgaagcggattacgaaacaggatctggattcaatgtcgccggaagatctcaatgtgctcgcgatctacagcaaaatgtcggccggctatgtgctgtccccgcaaattatcaaaaacacgggcgtgacaaataaagagtatgcgactgtgagcgagaatctttcagcgctgccgggcgtggacattacaaccgactgggaacggaactatgtgttcagagaggcaaacagcaacgattcggttttagggtcaatcctcggcgatgtgacaaccgaaaaagaaggcttgcctgccgacaaggagcagtactacacggcccgtggatacagccgcaatgaccgcgtcgggaaaagctacattgaacagcagtatgaagatgtcttgagcggcgaaaaagaaaaagtggaagcgaaacaggataaaaaagggaatgtcatctcttcaaaagtgatcagcaaagggaagccgggcagcgaccttgtcctgtctattgacattgacctgcaaaaagaagtggagaaaattattaccgatgaaatcaaagcggcccgcgcaagcaatccgcttgctgaccgtgcctttgtcaccgtcatgaacccttataccggcgaagtgttgtcaatggccggcaaacaggtggtcacaaagaacggatctgcgaaaatcaaggactttgcgcttgggaatatgacaaccgcttatccttcaggttcagcggtaaagggtgcgactgttttgaccgggtaccagaccggggccatctcgcccgggagtgtatttgttgaccagccgctccattttgccggcacccctgtgaaaaaatcgtgggttgccaacggttttggggcgattaacgacttaaaggccctgcaggtttcatctaacgtatatatgttccggacggtgatggcgatcggcgggcagcacaattatgtgccaaatggcccgctcaggattgacaaaatgaaaacgatccggacattgcgcaaatattttgcccagttcgggcttggcgtcaaaaccggcattgaccttccgggcgaagtcggcggctaccaaacggaagtcccgccgaacagcgggaacgtgctcgactttgggatcgggcagtttgacacgtatacgccgctgcagctttgccagtatgtttccacgatcgcaaacggcggttaccgtgtgcagccgcatattgcgaaggaaatccgtgaaccaagcccggacggcaagacactcgggcctgtcgagaaagacatcggcacgacggtcttaaaccgtgtggatatgaaagaatcatacatcaaccgcgtcaaacaaggtttctataatgtggtgaacgttccccacggaacagcttacgggcggattgattccagcctgaaagtggcagggaaaaccgggacagcccaggctgtttatggcggtgaactggtggaaaaatacgacgccgcaggaagaacacatccttctctctggagcaatgcatggaattccacttttgtcggctatgcgccgtacaatcatccggaaattgccatctcggtcgtcgtgccatggtcctatatggggggagcatccgacccgcacacgaatttaaaaattgcaaaccgtgtgtttaaagcctattttgatctggagaaaaaagaggagagcaaagcaacaaatacgccggaaaagacagttgcaaatgccaactaggccgtctccggctgaggaaaaaacggataacagggggaaccctgttatccgttttctgtataaatctattctggtatttgcatggcaccggaaatgatgcgtttcacttcgtttacggggagggcggactgccttgcgatctgttcgaatgaaaggccctgccggaacaaagcgagcacctggttttttacaatttcattgaccggacttttgccggacggatccggaagaaacggatcggctccgggcatcataaattcttcttcgagcgtctgtaatctttttttgatctggtacgtttcctggaaaaattttaaagacaaatcttccagttcctgttctaccagatgtgcgtggtcctggcggaaaaacgaaataagaaacaataccacagaaagcgccagtaacacaatcagcgtaataaccatccagttctctcctttttcattgcaaagtactattgttagttatatcatgattttcctgtgaagtgtaccgcctatccggcaagagggggccaattcgtgccagcaaagcgggaccggcaggcttgcttgccccattcaagtgaaaatttcacatatatcggcagccggtgggaagaacggttttgtttgaaaaaacatactggcaatcgtacgtgaaaaatgctatgatagaaaagtcgtatgcacgatcgattgagaaagatggagggatgaaacatgcgtgtaaacattacactggcttgcacggaatgcggtgagcgtaactatattacaacaaaaaataaacgtacgaccccggaccgtattgaattgaaaaaatattgcccgcgggacaaacgtgcaaccgtacatcgcgaaacaaagtaaacagcaggcgttttcctgctgttttttcttttgccacagcgttagcggataatttctcccccggtaggaaaaatagaaatgagttgcagaaaatttttcgggggaggaatcgccatgaacagatgggtgaagtggatggtggtgctgcttctgttttcagcagcttaccggaaccgttaccgggtattaaacactgtatttgggtacggccctgcgagaaaattggcggtcacggcggcaatgcggattcccggattacggtcgcgcgtcatgggccaggtttttcaatagcggtgaaaaaagggcgggtgtaaaaggccaaacgctttacactccgctctttttttcgatatagttaggataaaatggatggaaaaaggcaggggaaatcgtgaacagtagggcagatgttttgttttgggcaatcagccgccattttgtcgtggaacaggagtaccggatcctgtttttgagtgaaaaccgggatgaaatgtggcttgccaatacaaaaaagaagaatttgccgcttgtgcgtcttttgcggtatgacatcgactggggcaactggttataccgcgacatccgcgattgttgcgcacaggctgaagatttatgcaaacaaataaagcggcttgctccgcgcgtactcaatatttacgtaagcgagtatgcgccggttgacgattatgaaatctatttggatgaaccgatgcatatcaatggcggaaaaacggaactccgcagcgtattgattgaaggggagaatcctggtcccgggatcagtaagctgcgcccgttcacggaaagccggcttgccattgcgcctgaaacgatgagcggggacgcctatgcattacagcggacggtgttcgaagccgaggcgcgccgggaagaggaggaacggcagctgtttgacgcgggcaggccattttttacatacgtctttctggccgtacagattgccgtgtttattgttatgtcgcttaccggcgggacgcagaatacgcaaaacctgatccgtttcggcgccaagtacaatccgctgattatggaagggcaatattggcggctgattatgcccgtttttattcatatcgggatcatgcacctttttatgaattcgctctctttatactatatcgggccgcttgtcgaacggatttacggcaaggcgcgctttgccctgatttatttgttcgccgggtttacaggctgcctggccagcttcctgttttcaccaagcctttctgccggcgcaagcggtgcgatttttggcttgttcggcgcgcttctttacatcgggacggcttaccgagatctttttttccggacaatgggaccgagtgtcattacgctcatcatcattaatctcgttttcggtttttccgtttccggcattgacaatttcgggcatcttggcgggcttttcggcggctttcttgcagcatgcatcgtccactttccgaaacggaagcgcatcggtgtgcagcttccggctcttcttattgccgctttcctcgtttatatgggtctgcgcggcattcacccggcagactaataagcatgcccccgtttcggttccgggccgcttctttggcgtgcaagtgcgggcctttcgggggacggatcgtgccgggataaaaatttctctctttagggccgggggaagcgcgccggtatataggggcgccgtgggtttccgcggctatccttcaaaaaatgcaccgggcaaggtttcacggcgtacttccacgccgggcggccaaatgatccggcaaattgccgcaatttgatgcttgttagaagttgcacaatcgactatacttttcttggaacagattttttataaatgaaagctgggtcgaaatgagaacactttatgatgtgcaacagcttttgaaaaaattcggcattattgtctatatcggggaccggcttgccgatctcgagctgatggaattggaactgaggcagttgtaccaggcaagggtgctggaaaacagcgaatacgaaaccgccctgttgatcatcaggcaggaaaaacggttggaaaaagagaaaaaaatggagggtgagcgaaatggctgagaagtggatcattggcattgatttggggggcaccaccacaaaactggcatttgtgaatgaagcaggcgatattgtacacagatgggagatcccgactgtgacggctaacgaggggaaagcgatccttccgaatatcgcaaaatcgattgaggacgaattggcccgggcaaagcgggagaaaaaagagatcacagggatcggcctcggcgtaccggggccggttgatatggaagccggcgtgatttatgaatccgtcaatatcggctgggcgcagcattatccggttgccgggacattgcaaaaattggcggggttaaaagtggtgatcgataatgatgcaaatgttgcggcactcggtgaaatgtggaaaggcgccgggaaaggttccggggaaatggtcttcgttacgcttggcaccggtgtcggcggcggcatcattacaggcggggatatcgtccacggcgtaaaaggggcggcaggcgaaatcggccatattaccgtcatcccggaaggcggggcacgatgcaactgcgggaaaaccggctgccttgaaacggtcgcttccgcaacaggcgtggtcaggacagccatagcgaaactggctgcatttagcggcgcgtccccgttaaaagatttgtatgcccgaagcggatcggtaagcgccaaagacgtgtttgactttgcgaaagcgggagatgccctttcccacgaaattgttgacgaaacggcaaaatacctcgggcttgcgctggcaagtgtggccaatacgttaaatccggaaaaaatcgtgttggggggaggggtgtcaaaagcaggcgaaacgctcttaaacccggtgcgcgcttattttttgaaatacgcgttcaacacggtcggccaatcgacaaaactggaacttgccacattgggaaacgatgccggcgtgctcggggcagcgtggctggcgttaaataaaatttaagcggggcgcccccttccatgatacgcgctgattttggcatactacaaacagcgatataatgagatgaaaaaaagcggcatggcgccgctttttcagcattaagtaaaggccgggtagcccgaatggatgacggtcatgatggcaaaccagccgaaaagggcaaaagaaatgatgccgaaaataaatccgaggatatttttgtttttggccgcagtaatgaaaccaatcagtgacagtatggagacgagactgaaaataatgactgtacccatgacatcccccttataatgaaaaggtattcaattatctttattttacaaccggtctggtgatttgtcgagtaaatgaacaggcattttttacggatgaaaacatgatacaataagggaggagggatacgaatgaaatggaaacaattgccggtcgggcccattcagacgaattgctatatcctgtggaaccacgaaaaagactgtttgatatttgaccccggagcggaatttgaaaggctgcacgcttttatcggggaaaatgcgctgaacccgcttgcggtgcttttaacgcatgcccattttgaccatattggcgcccttgatgcggtaagggatgcgtacaaaatcccggcctatatccatcaaaaggaagagatgtggctcggggatccagggcaaaacggctcccattttttcgggatgggagaaatcagcgcgcgcggggcggaaaagcttatcgccggggaagacatgttgaaaatcggctctttttcgcttcaagtgctggaaacgccgggccactccccggggagcgtttcgtactggctgcctgatcacaacattgtcttttcaggggacgcccttttttccggcagcattgggcggaccgatcttccgggcgggaaccatggcgttttgcaggaaagcattcatacaaagttactggttttgcacccggatacaatcgtgttcccgggacacgggccgcagacaacgatcggggccgaaaaaagttccaacccgtttttggggggataaaaaaaccggcagcgaatgccggtttttttagtgcaaggaaaaagcaagcagatttttaagaggaacaggttattcgccgaagccgggtgtgagtataaacgtggtgtagtacgtaaagccggcgaagaaaattgttaaataagccccaaagatgtacatatacatgcgttcggacagtttcaagtagctgacaagcacaaagaaaccggtctgggccagaaacagtaaagcggtttctttcatgccgccaaggaaaaacatgactgccattacaccagtccagaaacccaatacgcggtacatacgatccaaatgaaccaccccttctttttatgtccatcaagttatattataaaggaacaaagaaggggtgtaaacacaaccggtacttaattcgcaactttagcaactttagcaactttcacatgataaatgcattcgctgcaatcatgaagcatggtttcctgctggttgatgtcgaaatcgtcaaacaacgcttcaaacaacccgtgaatataagcaacatgcatctcgcaaacatccgccgagtgatggattaattcccggaacggacagttgtatacatggtaatcgagttcgttcttgtctgttgtttccagcgtttcgatgcagtatccgtccacggtggacacgcttgcgagcacagataatttttcattaaatgtcagctggtcttttgttttattcatgttttttaagatgttttcgatgatccgttttccgtactcccggccgatctctttcaaaaggcctgcatctgccagtttcattttgttgatggcttcaagcaaaatgttggacagcaatttgtattcacggtgcgggaaggagagttccaccacttgttcagagcttttatacagccttgccgggcgcccgccttttccggttttgttcagttcggatgaaattatctttacatcttcgagcttcgacaaatggagccttgccacatttggatgaatatgaaattcattggccacttcctggacggatacttcgctccgtttcttcagtacaaattggtaaatcgagtagcgggtcgggtcagaaagggcgttgatcacttttaatgttggttccatattaaacacctctatattttttatcctatctatattataaatgataacaacgccaaaatttgtgacaaaaatcacacacttttttgcggctgagagaaaaaaatagcgaaaaaatttttgctttcagcaggaattttgaaagccgtgtcgaaatgagagaatatcccaaaagaaaggtggtatgtgatggattatgtcggtagaaaaaatcgcggaactattgattggacaggcggtgaaaaacaatgtgaccgatgtccatatcgttccgaaagagaagcattaccatgtccagttccggcagtacggaaggctgtacccccaccgcaacctttccgcgaaagccggggaaaggctgatatcccatttaaaatttatgtcttccatggatatcagtgaaaaacgaaagccccaaagcgggtcgtttgccataaacgttttgcagcaagcggtctccttaaggatttcgacgctgccaacctctctttccaaagagagcctcgtcatccggattttgccccacgaagaacaattccagctcagccaaatttcactttttcaatcgagcacgaaaaaattaatggcgctattaaaccattcgcacggcatgctgattttcagcggtccgaccggaagcggcaagtcgacgacgatgtatacgcttgttgagcactgcgcaaaacggtttttacggaatgtaattacactggaagaccctgttgaaaaacaaagcgattcgtttttgcaggtgcaggtgaatgaaaaagcaggcattacttatagcacagggctgaaagcaattttgcgccatgatccggatattatcctggtgggggaaatccgcgatgccgaaacagcaagaattgcggtccgcgcatcgcttaccggccatcttgtcctgacgactttgcatacgcgtgacgcaaagggcgcgatttacaggctgatggaattcggcgtgagcatccacgaaatggagcagactttgctcgctgtcagcgcacagcggctgattacattgcgttgtccggtatgcggcggcatccgctgcccgcatgattgtcccggcagccggaaaaagcggcaaaccgcggtatatgagctgctgtacgggaaaaatttgcagcgggtgctgaaagaagcaaagggggaacaggtccgctaccattatccgacgctgaaagaatggctcagaaaggggattgtgcttggatacatttctgaagaagagtatcaccgctggattgccgaagaggaagaagcggataagcctcaaacaacaggggcgctttcttacccgggtcggtgaaatgctcgaaaacggatttccgattgcggatgctattgattttctcgggcatgtggacggcgaactgaatgcgcgttccatgaacaaacagctgcaaaacggaacgccgctccatgacgtgctgctgaaacaccggtttgatgccaacgcatgcatgcaaatttattttgccgggcggcacggggagatggttgctgcccttaaagaggcaggtgcttacttattgaaaaagcacgaggacgcccttgccttttggaaactgatccgttatccgctcatactggcagccgcgctatttatcgccacggcttttgtgagaaacgtgctgctgccgcaatttgaacatatgtatgtcgcaatggattacaagccttcgcgaaatctccggctgttcctggccatcatggaacaggccccgcatgatatcctggttttaagtaattttctcttcctgtttttcacactcttttttctctattttaaaagaaaaaaaccgctcgtgcaggcggcatggctttcgcggctgccggtatcccgtttttactataccagttactacagccagtttttggcgagagaatggagctttatgctgaaaagcggtttttccgtctatgaaattctgcatgtaatggaatcgcaaaatttcaagccgctttggcgcgataccgcaaaatatgtgcgcgaaaaactgcttgccggcgagacattttcccacgctctggcctctgtcccgtttatcgagccgcagctggtcattttggtgcgccacggggagaaaaacgggcgccttgatcaggaactctattattacagccaaattagcttgaaaagaatggaagagaaaatccaaagcctgttcgggctgattcaaccggttatatttattttcatcggtttctttttggttgccatttatttgtcgatcatgctgccgatgttccagatgattgacgcggtttaaccggggaaggcttgccgggcggcggggcttaaagccttccccccagaaaaagaaaggagaaattgcccatgtctttaatcaaaaatcaaaaaggttttacgctgatcgaaatgctgattgttttgctcgttattacggttctcttgtttttgatgattccgaacatttccaaacataccgatgcgatcaataacaaaggttgcgatgcgttcattgccatggtgcagggtcaggtgcaggcgtatgaaatggaccacaatgaatatccgtcatccatcagccagttgaaagacggcggctatgtgtcgaaaacgagctgcccaaatggaaacggagtgaacatcggggcggacgggaaagtaacggaggttgcaaagtgaagcggccaaaaaacgaagccggttttacctttccggaaatgctcgttgttttgttgattgtatccgtgatcaccgcccttgcgtttgccggatttaagccggtgaaacatacgaccgtcaaaaaaatgttcatcaaccagcttgaaaatgatttgtacctggcgcaaacggacgcgatttcccgccagacgaacgtatacgtccaatttttccgccagaacaatatgtattccatttttgaggcgaggaaaaatgcggcgattgtaaaaagaaagcttccggaaggcatcaaaatgttcgaaaacggcagctttcattcctatacgatcgggccggacgggaatgttacccagttcggcacgctctatttccagtccggcggagaacaaatcaagctggttacgcatattggaagcgggcggttttatgtcgaagagtgaacggggctttacttttccggaagtcatcgctgcgtttgccgtattttgcctgatggcggcctgcttgttcccgccgtttctccatatgcttggccagatcaaagagacaaaacaggagatggaggcagcccgttttttatacgaaaaaacggaggaatggacttttaccggaaaagtcgttgaaaaagaaaaaaaggccggcggggccacgtggacatttcaaatcaaagacaatggcagaaaggcatgtgtcaaacatgagcaaaacaagacttgtgtttcgctccggcaatgaaaaaggctttacgctgcttgaaagcgtgtgcgtgctgtttctcgtcacttccttgttctcactttttcccctggcagtgaaaacattcgggacagccggggaagcattccggccggaagaagatgaagagtggaatctttttctcatgcagttgcgcaaagaaatccgggtgagcagctcgtgccaggcagcccaaaatactttgaaactgaacgaggcaggaaggacggttacgtatgaaccgtaccagaacagtttgcggcggagagtggacggtgaggggcatcaaattgtgctccaaaatgtgcggtccatccaatttgcggcaacaggaaacggggtcaaagtgtccgctgtttatccgaatggcgcggaaaaaacagcggaaatgacctttctttcccgccatgcgttcttcggccaaacggagggcaatgcccgatgaacaggcaaaaagggtttattttgccggtagtgctgtttttggcgcttgccgcatgcagtatggtcatttcgggaacaaatatttacctaggcgaaaagaaatatgccgtgctggtgaaggaatattatttgcggaataccatgtcgcttttcgccatcagggaggcggcgcaaaaattggaaaaaggcgacaaaagcccgggggaactccgtttttcagacggattggtgtcttacaatatcaaacaggacggggatactgcagtgatttccttaactgcggaaaatggcagtggtgaactgtttaaaagtacgatacgatataatcaggcagaaaaaaaggtgcttcaatgggaggaacaatgaacaaaaggatctatttgaccgggtttatgggtgccggaaaaacgactgtcggccatgcgctcgcctcgcttttgggcagtgcggcgacggatcttgaccgctggattgaagatgaggaaggaatgccgcccgctgccatttttgctgtaaaaggggaagcctattttcgccggaaagaaacagaaatgctgaaacgggccgcatcgcttgcaggggtgatcatgacaggcggggggattgtcatgcgggaagagaacgcctgtctattaaaacgggacggcgtgacggtttttctggattgcgatccggaaatcctggtttcacgcattcaaaatgacccctcaaggcctgtcgcaacaggaaggacaaaggaggagatcatcgccctttacaaaaaaaggcggccgttttacctttcgtgtgccgatttggttattgatacgacgggaaaatcggttgcggagattgttgcggaaatttccggccgcataaaaacggaagctttcggttatactggcgcctgtaaggatggtggcgccaatgtcgacaaatgattatgtcaaattgctggcacaaacatggatgcagtatatgagcacgccaaaaagcgagcggcagaaaaagcggaacgagaaaaaggaagagatgccgccttttgccgaaagatggttcggcattcttccttatttttttctctttttcaaaagaaaacagtagcagaatcaggcagcctttttggggctgcctgatttatataaacgcatcctttaaataaaagaggccgccgtttaggacatgaacggtaattttcggctcatactgttccttcagcgcctgtttttcaatttcatacgattccgggcgctcttccatatcttcgtaaaaatggtccaacagcgcgagatcctggtgccaccgttttaccgcttcttccgcccaatgatgcggttctttcgacaagccttgccggatatactgttcaatcctggtgacggcgcttttcggcatgataatcggcgtcagtgtaaaacaataatccggaattttcggcgtcagtgcccgttgttccagcaagtcctgaaaattttcagccattgtgccgtggattaaattcaacccgatcgagcggaatacatctttttttaaatcacagcggtacgaaattttggcgttcatcccaagccaagggtaaagtggcacctgtttttgcccggggcggacgtcttcaaacaggcggatatagcgggaaaactgctttgccgtctcgaaaatctggttcagacgggggcttccaaaatggaccggttccccttttaccgtatccggtgctttttcctggtccgtaatgaacgtgacggtcatcggattcgggatgccgcctgttttttcaagataggaccagtaaaacggccggttcattaacgccttatccagttcaaccgtcagctgcaccgtcatccagccggggcggttttcaaccaatacagcgccgtttgcttcaaaaaagcgttcaagatattgatgtatttcttcctgcagcatccgcatttccctcctctttccgtaccgcttccgcaaattcgatcatttgggtgagattttccattttgatgttcatttcgccttccgatttggagttttggaagacatccagcaggtggtcttccagttttccgaattcgagccgggtcagaatttcatcgagttccccgattacccgctcaaacaaatggattttttcgtacaacagtttcatgatatgttcttcaaccgtatttttggttgcgaaattataaatatgcacatccttttcctggccaaggcggtggacacgcccgatcctttgctcgagccgcatcgggttccacggcagatcaaaattgatcatatggtggcaaaattgcaggttgatcccttcaccgcccgcttctgtcgcaatgagcacctgggcgcggttttcaaacagctgccgcatccagtcttttttgccgcgcttaaagccgccgcggaacgggacggatgaaatgccgtgttgttttaaaaaccattgcaggtaaagctgtgttgcccggtattccgtaaaaatgatcactttatcatcaatgttttggataagctcgagcgctttttccgcttttgaattggtttttatcgcttcaattttctggatcagcgcagcaacggtttcttctaaaacgggcgagggctgttccgtttttttcagcaggttttttaaggttacaaaaacggcttcccggctcgaacacgcctcacgctgcagcgtcaatagcgagaagccggcgcggctgtacgattcgctgcctctgcggatcgtttgcagcgcgtcatacagttcgcgctcttctttgctgaagtcaatcagcaccgtttcaacgcgccgttttgtccattccaccccggtgtttgtgcgccggttccggatcatcactttgctgaccagcttccgcaaatgttcgtcttccttcacctgcctgtccccatttttatattttttgctgaaattcgattcgctgcctaaatggccgggtttcagcagggagacaaggtggaagatttcatcgatccggttttggatcggtgtcgccgtcaaaagcaggcagaatttcttctttaagccctggacaaatgcgtagttttttgtattcggatttttcagcttgtgcgcctcgtcaataataatcatgtcgtactgctgcttgtaaatgatgtcgcggtgcgggcttctttttgcggtgtcaatggaagagacaacacagtcatactgctcccacatataacttttcttctgcccgacagcgggaatatggaatttgctgttcagttccgcgacccattgcgacacgagcgatgccgggaccaaaatgagcactttttttgcaagcccgcgaatcatatattcttttaaaataaggccggcttcaatcgtttttccaagcccgacttcatccgccaaaatggctttgccgttcatcttttcaaccacctggcgggccgcttccagctggtgcgcaagcggtttgacattggccagatgctttggcgcctgcaacccttcaaattccggaatgaccagccgtttttccatttccactgcaagcttataaagttcccattttccccacggcccgtcctcctgatagcgttccatcaattccgtttcccacgagcggtcaaattcaatgttgacttccatgctgcctgcactccttttccaatcgtccccgatgcatcgttttccagttcttacagccgctttttattttaaaaaattcaattgattttcagaatggtgtcatgatacgatgaaactgaccaagcgtttttacagggtttacagggaaaatcgtatggaacagcctgcatcaggcattttaattttagtatgcccgattttgaactgaatattggcggatgagaataagaggagagactgcattttttgtagcgccgacggagcaagcggaaacgtgaatctctcaggcaaaaggactcttaatttgacgcatctctggagagcgcttcttttttcgggaagccaccaaaggggaaaaccgtttttcggtaaactttcaggtgcaaggacagggaatatttcgtgaagcaggcggaatattccctgtttttttgctcccggatccacatccggataaaaagcagaatggaggggtactaatgccggaattaaaacggacgccattatatgatgtttaccggaaatacggcgcaaaaacgaccggtttcggcggttgggaactgccggtgcaattttcgggcattaaagccgaacacgaagccgtccgcacacgggcaggcctgtttgatgtttcgcatatgggcgaaatcctggtggaggggccggaaagccttggcttccttcaaaaaatgatgacgaacgatgtgtccaaattgaagccgggtgctgcccaatataccgccatgtgcaatgaagccggcggcacagtcgatgatttgctggtttaccaattgggcgaaaaccggtattggctcgtggtgaatgccgccaatacggaaaaagattacaaatggcttgtttcacaccggacggaggatgtttctataacggacatcagcgtaaacgttgcccagctcgcgctccaggggccgcttgctgcggaagtaatgcaaaaacttgcgccagaagcggatgtttttaccattccatcgttttcatttattgaaaacgcaaatgttgccggttgtaaagtgctgctttcgagaaccggttacacgggcgaagacggctttgaaatttactgccgcagtgaagatgcgccaaagctgtgggacgaaatattggcgaagggccgggaaaaaggcgttttgccgtgcgggctcggggcgagggatacgctccgctttgaagccgggctctgcctttacggccaggaattggcagaagacatttccccgcttgaagccggcatcgggtttgctgtaaagcttaagaaagaagcggattttatcgggaaacaggcgctccttgcacagaaagcagaaggcctgaaacggcgccttgccggcatcgaaatgaccggccgcggcattccgcgccacggatacagcgtttatgcaggggatgagcggattggcatggtgacaaccgggacacagtcgccgactttaaagaaaaatatcggccttgcccttttgcgtgtaccgtgggacgcgcccggcaccgaagtagaagtggatgtccgttccaaaaagatcaaagccgtcgttgtccaaacaccgttctataaaaagcaaaaaaacggggagggggaaaagtgatgcaccgttacctgccgatgacggaagaagataaacgcgagatgctggatgcgatcggggtccgaagtgccggggaactgttttccgacatccccgaaaaagtgcggtttaaaggggattaccggatcaaaaaagcaaaatcggaaacggcgctgttaaaagaactgtcagaacttgccgggaaaaatgccaatttaaaagaatatgcttcttttttgggggcgggggtttatgaccactatattccaacggtcgtggaccatgtgatctcaagatccgaattttatacggcctataccccttaccagccggaaatctcgcaaggggaactgcaggccatctttgaattccagacgatgatttgcgggctgaccggcatggatgtggccaattcctcgatgtatgacggcggcacgtccatggctgaagcggccatgcttgcggccgggcagacgaagaggaagaaaatattggtttcaaaagctgtccatccggaataccgggccgttttacatacgtatgccaggggacagggcatcaccgtggaagaaataccgctcgcagacggctgtaccgacctggaagcggccaaaaaacaaatagacggcgggacagctgccgtcatcgtccaatacccgaactttttcggttcgcttgaacggttaaaagaaatcggcgaactggcccatggcgaaaaagctttgtttgttgtatccgccaatctgcttgccttaggggtgcttgcgccgccgggcgatttcggcgccgatatcacaaccggcgactgccaggtcttcggcattccggctgcattcggcggcccgcattgcggctactttgcgacaacgtcaaaactgatgcggaaaataccgggccggcttgttggcgaaacagtcgatgaggacgggaaaagggggtatgtgctgacgctccaggcgcgcgaacagcatatccgccgcgacaaagcgacgtccaatatttgctcaaaccaggcgctcaatgcccttgccgcatcggtggccatgagcgccctcggcaaaaagggcgtaaaagaaatggcactggccaatattgcaaaagcacagtacgcgaaaaggaaattggcggaaaaagggtttgaaatcccgttttcgtctccttttttcaatgagtttcccgtgaaattgccaaaaagcgttcaagaagtaaatgaacatttattacagaaaaaaatcatcggcggctatgatgcgggcaaggattacccggaatttgccggttgcatgctgattgccgtgacggaattgcggtcaaaagaagagattgaccaattggctgaagaaatgggggtcgtgtgctatggcaaatgaagaaatgtcgctgatttttgaacgatccaaaccaggccggatcgcgtatagcctgccggaaatggacgtgccggaagtggatgctgctggcctttttccgcctgaatacatccgcaaacaggatgcggaactgccggaagtgtcggaactggatttaatgcggcactacacaaagctgtcagaaaacaaccacggcgtcgattccggtttttacccgctcggatcctgcacgatgaaatacaatccgaaaatcaatgaaacggttgcgcgctttccgggatttgcccatatccatccgcttcaggatgaaagcaccgtccagggggcgctcgggctgatgtatgacctgcaggaacatttaaaagagattaccggcatggatgaagtgaccttgcagcctgctgccggcgcccacggggaatggaccgggctgatgctgatccgcgctttccatgaagcaaacggggatacaaagcggacaaaagtgatcattcccgactccgcccacggcaccaacccggcttccgcgaccgttgccggcttcgaaacggtcactgtgaagtcgaatgaagaagggcttgtggatctcgacgacttaagaaaaattgccggggaagataccgcagcactcatgcttaccaatccgaatacgctcgggctgtttgaagcgcatattcttgaaattgcagaaattatccatgaggcgggcggcaaactgtattatgacggcgccaacctgaatgccgtgcttgcgaaggcgcgcccgggcgatatgggattcgatgttgtccacctgaatcttcataaaacatttacaggcccgcacggcggcggcggcccgggttcgggtccggtcggcgtcaaaaaagagctggtcccgtttttgccggtgccggttgttgcgaaaaaaggcggccgctattatctggatgaagaccggccgcaatcaatcggcagggtgaagccgttttacggcaatttcggcatcaatgtccgggcctatacgtatatccgttcaatggggccggacggcttgcgggaagtgaccgagaatgcggtgatcaatgccaattatatgatgcggaagctggcgccgtactacgacctaccatatgaccgccattgtaagagcctctgccaaaatannnnnnnnnnnnnnnnnnnnnnnnnnnnnnnnnnnnnnnnnnnnnnnnnnnnnnnnnnnnnnnnnnnnnnnnnnnnnnnnnnnnnnnnnnnnnnnnnnnnattttggcaaaggctctaagcatgaatttgtgttaagcggcaggcgccagaaaaaactcggggtgcggacgtttgatatcgccaagcggctgcttgattttggcttccatccgccaaccgtgtattttccgctcaacgtggaagagtgcatgatgattgagccgacggaaaccgagtcgaaggaaacgctggatgcctttattgatgcgatgatccaaatcgcaaaagaagcggaggaaaatccggaaatcgtccaggaagccccgcatacaaccattgtcaaacgcctggatgaaacgcgggcggcgcgaaaaccggttttgcgttatgtgaaaaaataaaaggaaaaatgccgcggcaaagccgcggcatttttttatttccctgatttgattttgcctgtccagtttttaaagccgcctttcaactggtaaaggtcgcggcagccgtttttataaagcatttcagcggcgcgcccggtgcgcgtcccgttctggcaatataaataaaccggtttatcggtccggatctcttttaatctcattttcagctgagacagcggaatattgcgggcgcctaaaatatgtccgtttgcaaattcattcggttcgcgcacatcaatgagctgcgctttgcggtaacccgccttgaattcttcttccgtcaagcttttcaggatttttttctgccggtagtatctggcgagtgtatacgccgctaccgcaacaataacaatgatgactgtgtaccacgattgtgacatctgcatgccccctttcttacctgatgcgctatctactattatattcgtgttgcgcttttgaatcaaaatctttttttcagaaagccatgtcaccgctattttttcagtttttccgcctgaaaagcctgtagcccttgattttttatgttagcggaaaaaccggcacaaatgtgagcggggctttgccgtttttcgtcgttttttggtaaactggtaaagtgatatttttaagaagaggggttcatatgggaaaagaaacctggttgtttgtagattcaggccactgtccgccgttttttaacatggcgctggatgaggccctgctcgactggcacagcaaaggggagatcccgcccgccatccgcttttacggctgggatccggccaccctttcaatcgggtatttccagcgggcaaaacaggaaatcgatctcgaagcggtaaaacgatacgggctcggctttgtccggcgtccgacagggggaagggctgttttgcacgagcacgagctgacctacagcgtgatcgtatcggaagcgcatccggatatgccgaaaacggtcacggaagcctaccgtgtgatttcggaagggcttgtcaggggatttcgtgcgctcggccttgaggcgtattttgcggtgccgcggacggaagcagaacgggaggcgctaagatccccgcattcttcggtttgttttgatacgccgagctggtacgaactggtcgtggaagggagaaaagtcgccggcagcgcgcagacgcggcagaaaggcgtcattttgcagcacggctcgattttgctcgatatggatgaggagaagctgttcagcctgtttaaatatccgagtgacagggtgagggaaagaatgcagcggagttttaagcagaaggcggttgcaatcaatgaactacgcaccgttcccgtcacatacggggaagcaaaagaggctttccataaggggtttgaagaagggctcggcatccggctggaaccgtacaccttgacgccggcgcaacaggcgtatgtggaagaactggcagacaggcggtacaggtcggatgaatggaattttaagagataaatgaacatttgtttttttagcggccagaggcatgctttttcgctatttccttttgtgccacgctttttatggctgcttttttgatgcaagcggcaaattttttcgttatgcccggatttgcctgctttttcgggggatttctcgcattttcagcatgtcttattcttttttttatttgacaaaaagaaagaggtttgacctaactacaatatatggtatataaaaacaaaatgtcaatacaatatctagtgtttttgcttgcaatttttgcctgcggtgtgctattttaaaggaggcagaaccaccagagaatttgcatggagaaatagagaaggagttgtcgttatgtctgttgcttcgacagaaaaattatgggatgtggagaagctgaacgaagatatccgcttatttccgcaggtccatccgattacaccggatatgaacatcacgtacaaaggcgtttcaaggcttgtcatgattgacagatacgcgtttaaagacacggaaaaagtcacattgggcaagggcgattttgttgtcctcacgattaaagaagacccgaaatttccggccagggggctcggcgtcatcaaagaaatcgactgggaaaaaaatgaagcggaagtcttaattgaagaagattaccgccaggccctggaacacccggatgaaagagaaacaggggtcatcaaaaggccgcttgatatcattgagaagccgcttgaagtctactacgaacaaatcgcaaaacggaatgcaaccggcttagcggcagtggaaaaaacagaagagaaacggaaagaatggtttgggaagttttacaatgaactgaaaaacttaaacttcatcccggcaggccgcgtcctctacggcgcagggtcggaaacggaagttacttattttaattgttatgtgatgccgtttgtaccggattcgcgggaaggcatttccgaacaccgcaaacaagtgatggaaattatgagccgcggcggcggggttgggacaaacggttcgacgctgcgcccgcgcaatacgctggcaaggggcgtcaacggcaaatcaagcggctctgtctcatggctcgatgacatcgccaaactcacgcacctggtcgaacagggcggcagtcgcaggggagcacaaatgatcatgctggctgtctggcatccggacattgtcgaatttatcatttcgaaaatgcagaatccgcggattttgcgtttcctgatcgaaaatacgaacgatgagtggatccgcaagctagcccacgacaaattgaaattcacgccgctttccgaaatggaaaggcaaatgtaccatgggattgtgaactacaaacatattccgggacagggcggctttacggacgaagtcatgaaagaggcggaagaaaaactggcaacaggcgggcattacaccgtccataatccggaatttttaaccggcgccaatatttccgtctgcctcacaaaagaatttatggaagcagttgaacaagacgcggaattcgaactgaaatttccggatgtggaaaattacagcgaagaagaaatgcgcatatataatgaagaatggcataaaatcggcgatgtgcgcgaatgggaaaaactcggccgcaaagtgcgcgtctaccgcaaaatcaaagcaaaagaactttggaatttgattaacatctgcgcgacttactcggcggaaccgggcgtcttctttatcgacaacgccaacgacatgacaaacgcaaaagcatacggccagaaagtcgtcgcaacgaatccttgcggagagcaaccgctcgcgccctattccgtctgcaacctcgcagcggtcaatcttgcaaaaatggtcgacaaagaaacgaaagaagtgcgctgggaccaattgaaacaaaccgtccataccggcgtccgcatgcaggacaatgtcattgacgcgaccccgtacttcctgaaagaaaacaaaaaacaggcgctcggggaacggcgtgtcggccttggcgttatgggcttagccgaccttctcatttatatggaaaaagaatacggatccgaagaaggcaacaaacttgtcgacaaagtgtttgaaacaatcgcgaccgaagcataccgtgcatccattgagatcgcaaaagaaaaagggagcttcccatttttaacgggggaaaccgaagaagagacaaaccgcctgcgccgtgcattcacggaaaccggttatatgaaaaacatgccggaagacatccgcaaggcaattttaaaacacggcatccggaactcccatttgctgaccgttgcaccaaccggatccaccggcaccatggttggcgtttccaccgggcttgagccgtatttttccttttcctatttccgcagcgggcgcctcggcaaatttatcgaggtcaatgcggacatcgtccaggaatatctggatcagcatcctgaagcggacaaagaccatctgccgaactggtttgtaaccgcgatggatcttgcaccggaagcccatgccgatgtccaatgcgtcatccagcgctgggtggacagctcgatttcgaaaacggtcaacgccccgcgcggttacacggttgaacaggtggaaaaagtgtacgaacgcttgtataagggcggcgcgaaaggcggaaccgtttatgtggacggcagccgggattcgcaagtcctgacattgaaagcagaagaaccgcaggaagaaaaacaggaaaaagcggaagtgaaacatgcgaaacagcatgtcgtcctggttgatacaatcccggatatccggtcaacaaacgtcacatacggcaacgaaatcggcgatacctgcccgatctgccggaaagggaaagtgaaggaaatcggcggctgcaatacatgcgataactgcggcgcgcaattaaaatgcggcttgtaagcggaatagttgagaaaaaacggagcaaagcgatgctccgtttttttctgcttacaaaacaccggttaaaagaataatcggaaaaatggttaaaaaattttaattcgaatattgacagcaaaaacgtgatgaaaaagattggattgaattttgataagaatgcgattgtcgtagattcggcgatgcggacaaacatcgaaggcatatttgcggcgggcgatgtaacaacgtttgacggcaaggtaaagctgatcgccacgggatttggagaagcagcgacagccattgcaagcgcaaaagtttatctcgatccggccgcactcggcggtttcaaagtcaggctggtagatgttcggcctgacatcctgcatcaagcggaaaacataatcggatccgacatggaaaaagggctggcgagggggaaaatcaacggggcagacgctgaaaggataaaggcaaatatcgaatataccgttgatttgccggcagtagccggttctgcagatgtgatcatcgaggcagtgccggaaaacggctatccgaggggaaatctggaaatgtttgacacaacgatcggatggagatttgtaaatgaaaaattgaagaaaatgtacgggacagacagcatgccggaaacagcggaaaatgtcgcaaagcaattccacatcagccgggaagcgcaggatgcctttgcttttacgagccaaatgagggcgaaagcggccatggaagcaaaccgctttcaagatgaaatcgtgcctgtcgtgtatacggatcagaagggggaatccgtatctgtcatccgggatgagcatccccgccccgatactacgccggaaaaactggcaaggttgaaaccgctttttgtagggggccaaattgccggccttattgaggactgcccgtctgttgcccaattattagaagaaatggtaaaagaagcacgggctgtgctaaccaggagcatggcgcggttataatcccgtatgaactctttgttctaattcctttccttatgcgctaaaataataaaaaagcatttttttcatctttcgttcaagcggggcatcctgccaacattccgcattttttctgaccaacaaaccgaaacgcccggtgcaaatccaagggtggatttccatggagattgacgcggtgttttccggcggaggcataaaaggccttgcgctcatcggggcattggaagttttggaaaaaaaaggatttacgtttaaacggctggccggcacaagcgtcggctccgtttttgcagggctgcgggctgcaggctatacaagcggcgaaatgaagcaaatgcttgcggaaacagacacggccgcgtttcttgaccagcgaaaaccgctgctgccggtgccgtttgcgaaatggctgctgctgtattggcggctcgggttgtacaggggcaccgcgtttgaggaatggatcggggaaaaactcgcatctaaaggtgtgtacacgttcaaagatgttccaaaaggctccctttatttcacggcatccgatcttacccataaccggcttgttgttttgccggatgacctggaacgttacggggttccatggcaaacctttccggtggcaaaggccattcggatgagctgcagcattccatattttttcgaaccggtacggttgcgctcgctggaaggcacaagcctcattgtagacggcggggtattaagcaattttccgatgtggttgtttgtcaaaccggaagaaaaaaaggcgcggccggtgctcggcattacgctcagcccgaaaccacaggaagagccggatgtggagataaaaaatgcgatccagctgttcgatgccctgttcaagacgatgaaagacgcccatgatgcccgctatatttcaagaaaactggaaaaagacattatttttatcgctgcagatggcgtgactgctacagattttcagctttccgccgcacaaaaagcagccttaatcgaggcgggccggaaaaaaacagaaacgtttctgaaaacgtggtcctattaataaaaaagaatcgagcttagtagacagctcgatttttctttttgccctttttgccttcaatcacggttaactggacattggattttttgcgcagcggccgttttgaaaatttaaccgtgtggacagtatggaccttcatattcctttttttcattcttttcctggatttgcgggcggcttttaaaaatgctttttgttcctggttggaaacattcgtgcttctcttgagcaggaaacgcatgccagccaaaagcactgccgcaaaaatgaaggctatcaacacccttttcaagaatacaaccggctcatgaaacaaagaggaacccaggccgaccagggccaaaagaaaaatgccggcgatgatccattgacgcgtcttcaacaaaagccacctcctcatgttttcccaaccattttttccatcattctaccagtttatacggatccggccgtttttattttgaggttgattccccgtcgcacaaacaagcttgtgatagtaaatgtattcccatgcgctggaaatttcaaacgccgtttttaacgggcggcagaagccgtatcacccgattccagttcaagcagcgcctgaaaggaggaaatcgcgacttcaatttgcttgtcatccggctcttttgtcgttaacagctgcagccacaggcccggatagccaagatacttcagaaccggaatatggcggactttattggtcagctgaaggacttcaaacgccgtgccgagcacgaccggaatgagcaaaatccggtcggtgatgcggagccagagcggatctgtcgggacaagcgtataaatcaggacgctcacaatcacggtaaacagaataaaactgctgccgcaccggtaatgcagcctcgattgcgagcggacgttttcaacggtgagggcaagcccgttttcaaatgtattgatgactttatgttcagccccgtggtattggaatacccgcttgataaacggcgttaaagaaatcaaataaatatacgaaagcacgagcagcagtttaaacgcgccttcaatgagaatttgcgcggcatccccgggaaaaaacggccttgccagttctgccagaaaaacgggaataagcgtcatgaaaaatttggcaaacaaaaaggacaagacgccggcagcagccacgccgagcaccacggttgtttttgcgggggctgcttccttccgtttttcgtcttcttccgggtcaacatcataccgctcgcttgcaaaattcaaatgctttgctccgtttgcggatgattcaatgatggcaatgatcccacgcaaaaacgggatttttttcaatttttggatggacgggcgcgtctcttttggcagataaaagaagtcgatccggttgtttttgcggcggatggcagtgaccgaatgccgctttccaccgaacataaccccttccacgactgcctggccgccataaactggttttgtcaatttcttttcccccaaacctgaacttcaaatgcttctttcccgtttaacctgaaaacggagtggatttccgaaacgatattcactcttattttactaaatcattttaaatacgactaggggaaagacttgtgggaaagataagaaagaaaagatgcatgccgtcacatgtgaaggggtggaaaatatggaaaatggcagcaaagtattaaaaaaccaggagcattccatgaccttttttcaaatggtgcttgtgaccggatttgcgggcgggatcatttggagcctggttgcctatttatgcttttcttttcattttacggcgattgaaccgaatgtcctgcttgaaccatttacagtaggatcttggcgcaaaatgtggatcggaaaaatcgtttccatattggcatacggattgttttctaccggctgcgcccttgtctattatcttttctttaaaaaattgaaatcgatgtgggtcggcgcgatctacgggctttgcctgtgcgcagccgtcctgattgtgctgaatccgatttttcccggcatgaaaccttttctcaaactggatgccaatacgatcattacctgctgttgcatttacattctctacggggtgtttatcggttattcgatttcttttgagtatgaaagaagccgggtttttaaaagaaaactggagaggcagtcgaacccgctcccataaatcgaaacgggcgggtgccggccggaaagttaaaaaatagaaattttcttcaatttatggtaaaatgggcacgttaaatatgggaaaaaggtgcttgaaatgaaaaaatacctcgtattaaacggcccaaatctgaatttgctcgggcaaagggaacccggcatttacgggagagattcgcttaaggcattgatggcgcgcatggaagcggcggcccggaagcacggcgtcgccatcggtttttttcaatccaaccatgaaggcgccctgattgacaagctgcacgctgccggggatgaaggctttgcagggattattttcaatccgggcgcgttcacgcattacagctatgctttgcgggacgcgatcagtgccatccgcctgccggtgattgaagtacatatttcgaacatccatgcccgcgaggaattccgccaccattctgtaacggcggctgttgcgcaggggcaaattgcaggcttcgggctgtacggctatgagcttgccctcatggccttgcttgaggcagaaaagggagaggaagaaagatgttaaaactggagaaactgagagaaacatttccgcaggccggtattgacggcttgctcattacaagcccgtataaccgccgctatatgtccaattttacggggactaccgggattgtccttatatccggggaagcggcaaaatttattacggacttccgctatgtcgagcaggcatcgaaagagtgtgaaggctacgaaatcgtccagcatcaggggccggtggaacaggaagtggccaaacaggtggaagcaatggggatcaaacggctcgggtttgagcaggaccatatgagctatgcgctttttaaaacgtatgaagggctgctcgatgcggaactggtcccggtttccggccttgttgaaaatttgcgcttgatcaaaacagatgaggaaattaagatattaaaagaggctgcggatattgcggatgctgcctttaaacatatccttgacttcttaaaaccgggcgtcacggaattggaagtttccaatgaactggaatttttcatgaggaaatgcggcgcgactgcttcttcatttgataccattgtcgcatccggcctccgctctgccatgccgcacggggtggcgacggacaaggtgatcgaaaaaggcgatttggttacgatggattacggcgcgctctataaaggctattgttcggatattacaaggacggttgcggtcggcgagccttccgggcaattgaagaaaatctacaatattgtgctggaatcgcagctgcttgccgtccaaaacatcaaaccgggcatgtccggtattgaagcagacgccatttcccgcgattatatcgcccggaaaggttacggcgatgcgttcggccattcccttgggcacgggatcggccttgaaatccacgaaggcccgaatctttccatgcgctcggcctatactttggaaccgggcatggttgtcaccatcgaaccgggcatttatgtgccgggtgtcggcggcgtccggattgaagacgatacggtgattaccgaaaattcgaatgaattgctgacgcattccgcaaaagaactgattatattataatagttacagccctcaacaggggatcgaatgaacatgtaggaggaaaaatatgatttcagtaaacgattttcgcaccggcttaacgattgaagtggacggcggcatctggcgcgtcctcgatttccagcatgttaagccgggaaaaggcgccgcttttgtgcgctcgaagcttcgcaatttgcgtaccggcgctatccaggaaaaaacgttccgtgccggcgaaaaagttgaaagggcacagatcgacaaccggagaatgcagtatttatatgcaaacggcgaccagcacgtatttatggatacggaaacgtatgaacaaatcgagctgagcagcgcccaaattaaagatgagctgcaatacttgctggaaaacatggaagtgcaaatgatcatgtaccagggagaaacgctcggcattgaactccccaatacggtcacgctgacagttacccatacggaaccgggggtaaagggcgatacggcaacaggcgggtccaaaccggccacgcttgaaaccggcctgacggtacaggtgcctttctttgtcaatgaaggcgataaagtgatcatcaatacaacggacggttcatacgtgtcccgtgcctgatttctttgaaaaaagcttggcgtcccaaacggcgccaagcttttttgcttttctggcaagagacaggcaaaaataagtttacataatcatgttataaataacttaaactttcagcatctgcctcgcttccttgtcatagttttcaaacccggcgaatagattgtactatccatgaaccaaactgtatgttttgaaagcagggatgaagatggaagatttgctgggcattttgccgaaaaccttatccaaacagctggaaaagttgggggacatgctcgaagatgtggaagaaatccgcatccgcgtaaaccgcccgcttgaaattacttcaaaaggaatcccgcattttttgcgctatacgccaacggggagcgatgctgagcagctgatcaaccggcttgcgaatttctctttttacgcccttgaagaagagctgaaaaagggatacgtcacgatcagcggcgggcaccgtgtcggattcgcggggaaagtcattcttgaaaatggacaagtaaaggcgatccgctatttttcatcttttaatatccggattgcccgggaaaaaatcgggactgcggatccttatcttttcgcccttcacaacgggcgctggctgtccgcgatgatcatcggggcgccccagaccggaaaaacgacttttttaagggatatcgcgcggctgatttcaagcggcatcccggaacgcgggatttcgcctgccaaagtggggattgtcgacgaacggtctgaaattgccggctgcgtccatggcatcccgcaactccatttcgggccaagggtcgatgtgctggatgcctgtccgaaagcggaagggatgatgatgctgatccggtcgatgagcccggatgtcattgtcgtggatgagatcggccgcgaagaagatgcggcggcgattatggaggcggtaaatgcgggcatttcgctcgtcatgacaacgcacggggaaaacttccgggatatccaaaaacgcccaattttaaagaaaatcctcgaatcgtatgcgtttgaccgctttctcgaactgtcacgggggagccggccgggaagggtaacagcggtccgcgatgcggaagggaacatcatccgtaccggtgaaggtgtttcccgtgcttaaactttttggagcagcactgattgtgctcgccaccagtttcatcggctttgaggcagcaaaacggttaagcgaacgcccccgccagctgagaatttttcaaaacgcgcttcaggcactggaagtggaaatcatgtacgggcataccccgctgcatgaagcggcaagaaaactatcaggccagctcccggatccggctgccgccttcttccgttcctttgccagccagttgaccacattggaaacaacggtcaaagaagcgtgggaaaaaagccttgacggaatttggaaactgacggccctgaaagaaaacgagtatgaagtattgcggcagctcggggaaaacctgggcaaacatgaccgctataccgagcaaaagcagctgctcctggccctttcacatttagaaagggaagaaaaagaagcgcacgaaaggcagctccgctatgaaaaaatggcaaaaagccttggcgtcctcacgggtttactgatcgctattttactgatctaaagtctcacggatcatattgggggaaaagcaatgggcattgatgtggacatcatttttaaaattgccggggtcgggattgttgtggcgtttctccacacgattctggaccaggtcggcaaaaaagaatatgcgcaatgggtcacgcttctcggttttctttacattttgtttttagtggcatccatcgtaggggatttgttttccaaaatcaaaacggtctttctttttcaataagccgggaaaaaaggggggatttcccattgaaattttgcaaattgcgggtgtggcgctcatcacgactttccttgcgctcatattaaaagagcagaaaccgaattttgcctttttgctgacgctttttgccggctgttttatttttctttttctggtggacaagatatacgaaatcatccacctgctgcaaaaaattgcccaaaaagggaatgtcgacacgatgtatatcgaaacgatcctgaaaatcatcggcgtcgcttatattgccgattttgcagccaatattacaaaagatgccggtcagggggcacttgcggcaaaggtggagctggccggcaaaatcattattttgacaatggccatccccattcttaccgtgctgatcgaaacgattgtcaatctcgttccgcgtgcagggagttgaggatatggggcacaaaaaaatatgcatcgcacttttcattctgtttgccttctgtttcttcgcacagtcggcatccgccgcttcggaaaatacggacaaacaggagaatatttcggaaaaaatggtcgatgaacaattgaatcaattggacttatcagaactgaaaaactactgggacgacattgtcagcaaatacggcggatacttgccggaaagccagaaagggagccttatggattttatgaaaggcgagaagcatttttccttgcaagcctggctgaaagggctgctttcgtatattttccaggagctgctgatcaacgcaaaactattaggctcccttatcatccttacgattttaagcatcctgctggaaaacctgcatcattcattccagcaagggacgatcagcaaaattgcgtacgcggttgttttcatggtgctcgtcattattgccctgaacagttttcatgtcgcccttcaatacgcgcttgaggcgatccggacaatgaaaggttttatcctggcgctgatgccgctcttgctggctgtgctttccacatcaggcggcgccggctcggcagccttttttcacccggccattatttttctctccagcacaagcggcatgctggtcgagatcatcgtgctgccgcttctgctgctttcaacactcttaggcgtcgtcagcaccctctcggaacagcataaagcaacacagctggccggtctgttgcgcaatatcgggatcggcatactcggcgcttttatggctgtgtttttaggcgccttgtccgttcaggggacggcaacggcggtgatggacgggcttgcggtccgtaccgcaaaatttgtgactggcaattttgtcccggttgtcgggcggatgctgacggatgccgccgatacggtgatcagcgcttccgtccttttgaaaaatacgctcggcattgccggggttgccattgtgctgctcattgcggcgtttccagccatcaaaattttctccatgtcgttcatgttcaagcttgcttccgcccttttgcagccgctcggcggggggccggtcatcagctgccttgatatcatcagcaaaaacatgctgtacgtatttgccgccctcgcgattgtgaccatcatgttttttctcagcattacgatcatcgttacggcgggcaatcttacgatgatgatgcgttaaggggggagaccttgtggacgttttgacaaaatgggtgctgaacatcatcatttttatccttttggcggccataacggacatgcttctgcccgactccgggatgcggaaatatacaaagcttgtgaccgggcttttgctcattgccattattgtcacaccgatattccggcttttttccgccgatcctgccatttggatggaaaaattggggaattccggaatttcaagcccgtctgcggaagaaaatgcgcttgaaacgaagaaaaaagaaataaatgccatacagcaggaatatacattacaacaaatggctgtccaactgaagcaagatgcggaaggggaggtagaggaagcgtttggaaaatcaatttcaaaaatcacggtcgagtggaaagacggggccaaaagcggggatcttaccgctttaaaagcttcggatgtaaaaaaagtccgtgtctatctgaaagcgcaaaacgaaaaagaagctgttgctgccgttaaaccggttgaaatcggggcggataaacaaacagaaaaacaaagcacacgcgagcagcaatcgatcattgccatgttgtcgaaccgctggaaaatcaataaagaaaaaattgatctccgtttcgaaggggggcttgaaaacgaaaatggatcgtaaccagggaccgttcaaaaaactgaaagaaaaatggctgccatctggcccgcctgataaaaagaaaaagcttgtgctgttaaccgtactactgatttccggtctcgggatgatgtttatcaatgaccttttcggacattcaagcgaaaaaaacgaagcgctgactgcatcttcacccgtaaaaacggcaggcggaaaagggacagccgcattcggtgcaggcacttccaaaaaatcaaaatcgatctccacgtacgaaaaccaatatgagaaagaactgaaaagcattctggaacaaatcaagggcgtcggctccgtaaacgtacgggtgaatgtggccgcatcagaaagcaaagtgtatgagaaaaacgccaccatccggaatgaaacaacaaccgaaacagataaaaacggcggggaacggaaaattgacagcatttcaaaggatgataaagtcgtcattgtccaaaacggggacaaggaagtgccccttgtaacggaaacaaggaagccagagatcacaggggtgttagtcgtttgtagcggcggcggcgatgtctccatccaaaaatcggtaaaagaagctgttgcaagcgcccttgacatcgcaagttaccgtgtttccgtcatgccaaaaaaagaatgaggaggatgggtatgcttttgaaaaaacaaacagtctggctgttgaccatgttaagccttgttgtggttttgtccgtgtactatgtgacggcggaaccgaaaacaacgaatcaggttacccggcaagagaaagaaaaggaatcggcggcaacaaaggaaaaggattccggttcgcaaaaaatcaaactgacaacaaagtctgccagtgatgaagtgtttgagacgctccgccttgagcggcaggatgaaatgagcaaaaagcaggaagaactgaccaataaacttgcatcgaccgacctgacgccggatgaaaaaagcaaggcgatggatgaaatgaaaaaattgacggagacggcgaataaagaacaggttttagaaagcctgatcaaagcaaaaggatatgaggatgcgctcgttcaggcggacggcgatgaagtggtcgtaaccgttaaatcgaaaaagcatgataaagcggctgcaaatgagattgtcaagcttgtgaaccaggagttgggcaatacgccaaaactggctgtggaatttcagacaaattaagaaaagccagaatagggggcggttacagcccttttttctgtgcggaataacaagggggccccgcttttttgccgggcttttttctatatttaaaaaatgattgaaaaatagatttgcgcgtgattttaaatttccgtaaaacgcttcattccttttgctccaagcagggaagggcatttttgcaacgtgccggaaatccgttttttatacaaatcattgaatttttgcctccggttatcgtatgatatggatagttattcataaattgttaacaattttggaagctgaaaaaacgaaggagtgtcatatatgctaaaagtagaggaaatccaggctttgatcgagcttgtggaccgttcaaacctcgatgaatttgaatttgaaaatgacgggaccgtcatcaaaatgaagaaaaacaccggcgttcaagtcattgaacgcccggtgcgcgaaatggcccaggtttccgcacccccgcaaatgcctgctgagccccgccagcttgcagaaaacctgcagcctgaagccccggcgcaagcagccgacgaaaatctgcataaaatcgtgtcgccgatggtcggcaccttttaccaggcgggttccccggaagatgaaccgtatgtgcaaatcggctccaaagtcagcccgaatacggttgtatgcatgattgaagcgatgaagctgtttaacgaaatcgaagcggaagtggaaggcgaaattgtagatatcctcgtcaaagacgggcagctggttgaatttggccagccgttatttttggtaaagacaaagtaaggagcggactttcatgattaaaaaagttttgattgcaaaccggggcgaaattgcggtccggattattcgtgcctgccgcgacctcgggatcgaagccgttgccgtttattcggaagcggacaaaaatgcgctgcatgtccagcttgccgatgaagcgtactgcatcggcccgaaagcatcgaaagacagttatttaaattttgccaacatcatcagcgtagcaactttgacaggctgtgacgcgatccatcccggttacggattccttgccgaaaatgccgattttgccgagctttgccgagaatgcaatattgagtttatcgggccaagcccggaagccattgcgaaaatgggcgcgaaagatgtggcacgcgaaaccatgaaaaaagcgggcgtgccgattgtcccgggttcggacgggcttgtaaaagatgcagaagaagcaaaagtagtcgcacaaagaatcggctatccggtgattattaaggcaacggccggcggcggcggcaaagggatccgcgtggccttgaatgatgaagagcttgtaaaaggcatccacatcacccagcaggaagccgcgactgctttcggcaacccgggtgtttaccttgaaaaatatattgaagacttccgccatgttgaaatccaggtcatggctgacaaattcggcaatgtgatccacctgggcgaacgggattgcaccatccagcggcggctgcaaaaactgcttgaagaatccccgtccccggcgctatcgagcgaaatgcgcgaagaaatggggcaggctgccgtgaaagcggcaaaagctgttgactatacgggggccggcacaatcgagtttattttcgaccaccgcaaccagaagttttactttatggaaatgaatacccgcatccaggtggaacacccggttacagaaatggtcaccggcgtggatctcgtcaaagaacagatccttgtggcatccggtgaaccgttatccttaaagcaggatgaggtcacatggagcggctgggcaatcgaatgccgaatcaatgccgaaaatcctgaaaagaattttatgccgtctgcgggcaaaattaatttttatctgccgccgggcgggatcggcatccgcgtggaatcggccgtatatccgggttacagcattccgccgtattatgattccatgattgccaagctcattgcctacggggcgacgcgcgatgaggcaattgcccgcatgaggcgcgcgctcagcgaatttgccgtggaaggcgtccacacaacgattccgttccatcagcgcctcctcgagcatgaagtttttgtcgaaggggatttcaacacgaaattccttgaaaaatatgatgtaatgaaataacgtgtaaatagaggaggtgttgaagatggcagaagataaccaaatgttggagatgcatcatgatgaagacggcctcggaaaagtggaaattgcccctgaggtgattgaagttattgcgggcattgctgcttccgaagtcgagggggttgcccaaatgcgcggcaatttcgcaagcggcgttgtggagcgccttggaaggaaaaaccacggaaaaggcgtaaaagtggaactgaatgatgacggcattaaagtcgatgtctattgcaccatgaattttggcgtttccattccggcagttgcccaggaagtccaggataatatccgccaggctttgctcaatatgacagccctggaagcgtctgaagtgaatattcatattgtcggcattcaatttgatacgcaaaaagcggagcctgaatttcaggcggaagagtaagagaaaaagggtccgggcaaagcgtcctggcctttttttggtcctgcctttctgttacaataaaagcatgcgaatttgagctttttaaaggagttactgccgaatgatgaaaagaagaaccgcccgcgaaaaagcgcttcaggctttattccagatggatatgaatgaagcgagcccggaggatgcgatccggaatgcgctggacgggcaggaaagtgatgattatctggagaaattggtaaacggaacggcaacacatctcgcgaaaatcgacgccatggtcagccggcatcttgaaaattggacgcttgacaggcttgcaaaagtggaactcaatattttgcgccttgccgcttacgaactgatgtatgcggaagatgtgcccgctaatgtggcaatcaacgaagcgctcgaaattgccaaacggtttgcagatgaaaaatccgccaaatttattaacggcgttttgaatcaaatgaaagactcgattgaatctaagtaacgggggatggataatggaagcggaaatcattgacggaaaacaactggccgaagcactcagaaaagagataaaggcggaagtggagcagctaacgcaacaggggattaccccggggcttgccgtcatattagtcggaaacgatccggcttcacgtacatacgtcaaaaacaaagaaaaagcgtgccgcgcgctcgggatgaaatccgttttaatcgagcttcccggggacgtgccggaacaggcattgctcggacatattgcaaccttaaatgaagatcctgacattcatgggattctcgtccagcttcctttgccgccccatatcaatgcgcaaaagatcgtggaagcgatcagcccagagaaagatgtggacggtttccatccggtaaatatcggaaggatgatgacgggccaggacgcttttttgccttgcaccccccacgggattttaaagatggtgaagtcaaagggcatccggatcgaaggaaagcatgttgtcgtgatcggccgcagcaatattgtcggcaaaccatgcggccagctgttcctcaatgaaaatgcgaccgtcacatactgccattccaaaacggcggatttaaaatctttcacccgccaggcggatattttggtcagcgctgtcggcaaagcgaaattcatcaaagcggattttgtcaaagcgggtgctgctgtcattgatgtcgggatgaaccgtgacgagtccgggaagctgtgcggggatgtggactttaatgaagtaaaggaaaaagcttcctatattactcctgtcccgggcggcgtagggccaatgacgattaccatgctgctttccaatacagtaaaagccgcaaaacgcttgcgccgttaaacaggctgccctgccgccacggcattttttcccggaaagccgctcttcgtccggaagtgtgccgggggggcatttgtgcgggaagcaggccgcattaaaagaaagctgacttccggcgggaaggcagctttcttcatgcatgagaaaggtggtggaaaaaggctttgcaatatttatccgtacacacgctgacaaaatatatcaaacggaaatttgacgcggacccttatttaaacgatatccatgtaaaaggggaaatttccaatttcaaacggcattcaagcggccatatgtattttacgttaaaagatgaaaaagcgaggctgctttcggtcatgtttgcttctgcaaaccggacattgaaatttatgccggaaaacggcatgaaagtgcttgccacagggtccgtatctgtttatgaagcaggcggcagttaccagctgtatgtgaaaagcatgcagcctgacggaatcggcgcactttatcttgcttttgaacagctcaaagaaaaactggagaaagagggcctgtttcaaaaccgccgacccatcccggcttacccaaaagtcatcggggtgatcacatcgccgacaggggctgctgtccgcgatatcatcaccaccatcaggcggagatatccggtcgctgaaatcattttacatccggcccttgtccagggggaaaatgctgccccttcgattgtaaaggcaattgaacaggcaaaccggatcggcagagcggatgtgctgattgtcggaaggggcggcggctccatcgaagaactgtgggcttttaatgaagaaataacggcccgggcgatctttgcgtcaaatatcccggtgatttctgctgtcgggcatgagacggattttacgatcgccgattttgtggcagacttgcgggcgccgacgccgactgctgcagctgaacttgccgttccccatattgatgacgtgcgggaaaaaatattatatttgcagacgcgcctaatacggaacatgcgggagaaagtgcgccatgaaaaaagccggcttgtttacctcgaacggtcgcccgtttttacaaatccttaccggctcatccgccaacaaatggagcaagccgaccgccttacagaccgcctgcacagagaagcggggcgcttaatcggtacagcggaggaacaaacccgcaatctgcacggccggcttttgcgcaaccggcctgaacagaaactgctgcaggcgcggcggaatttcacaagcctagaagcaaaccttgtgaagcaaatgcaagcggttttgcgggagaaacagcatcgctttgccaaaaatatttccgcccttgaagcgctgagcccgttgaaagtaatggaaaggggctacagcctggccatggcggaagacggaacgattctgaaaaaaacaagccaggccaaaacgggtgacacgatccgggtccggctgacggacggcggccttttgtgcacggtggatgaaattgaaagggggaaagaaaatggctgattcattaacttttgaagaagcaatggtgcaactggaagacattgtccggaaactggaagaaggggatgtgcccctcgaagaagccatttccatttacaaacagggaatggagctatccaaattactccatggaaaattgaaaaatgtagaggaacagctggcaaaaattatgtctgaagacggcgaagagcaggattttgagatccgggaggaggaataaccgtgcagaagcctgcgtatgatgtgaaaaaaattgaaaaacacctggcacaatatatcgcggatctccatgcgccggctgtattaaaagacgcgatgcattattccctccaggccgggggaaaaaggatccgcccccttcttttgctgtcaaccgtatccgcactcggcaaaccggttgggcggggcatgcagaccgcgtgtgcagtcgagatgctccacacttattccctgatccatgatgacctcccggcaatggacgatgatgatttgcggagaggaaagccgaccaaccataaagtatttggcgaagcggtggcgattcttgccggcgacggccttttgacgtacagtttcgggctgattgccgaagatccgggtttggatgacgctttgaaggtaaaactgattgcgctccttgcaaaatctgcgggcccggaaggcatggtcgccgggcaggtggcggatatggaaggcgagaataaaacactgaccctcggggaactgcaatatatccatgcccacaaaaccggcaaactgcttcgtttcagcgtgcttgccggcgcgttgattggcggcgcgtcaacagagcagctggaaaaattcgggcaatttgccgatcatctcggcctcgcttttcaaatccgggatgacatattggatatcgagggggaacaggaaaaaatcggcaagcgggtcggcagcgacgaatcccgccataaaagtacatatccggctcttttaacgcttgagggcgccaaacaagaactcaggcgccatgcccgccttgcaaagcagtgcctcgcagaaaccggcgccgaaactggcgccctaatggaactgacggggatgatcgaaacgcgggaccattaacggccgttcatttggcgcaaaacgaacggccggaacggcaaaaccggcggcgtttgtttatgaggtatttcttgtctaaacgcgttgattgtttataatagatgtaagtgatgccgtacattgatgaggaaagcgagtgatccgcattggatcttgaatcgatcaaggacccgtcctttttgaaacaaatggacatccccgcattgaaacaactgagcgcggaaatccgccgttttttgattgaaacactgtctgagaccggcgggcatatcgggccgaatcttggtgtcgtggaattgacgcttgccctgcataaatgctttgacagcccaaatgataaaatcctctgggacgtggggcaccagtcgtatgtgcataaaattttaaccggccgggccggagagttcggttcattgcgccaataccacgggctttcagggtttccgaaacgggacgaaagcattcatgatgtctgggaaaccgggcacagttccacttccttgtccgccgcgatgggcatggcggtcgcccgcgatttaaaaggagaaaaatcgtatattgtcccggtgatcggagacggcgcgctgactggcggcatggcatttgaagcgctcaaccatatcggccatgaaaaacgggatatcatcgttgtgctgaatgacaatgaaatgtcgattgccccgaacgtcggcgcgcttcaccaggtgctcggcaaactgcggacggcaaataaataccggcgcgcaaaagatgaactggagttcctgctgaaaaaaattccggctgtcggcggaaagcttgcggccactgcggaacggctgaaagactcattgaagtatttgcttgtctccggtattttttttgaagaactcggtttcacttatttaggccccgttgacggccatcattttgaggcattgctcgaaaatatccagtatgcgaaaaagacgaaaggcccggttcttttgcatgtcattaccaaaaaaggaaaagggtatgaaccggccgagaacgatacgaaaggcgcctggcacggcaccgggcagtataaaattgaaaccggcgattttatcaaaccggcggatgcccctcctgcctggagcaaactcgtcagtgataccgtccttagccttgcaaaggaagatgcgcgcattgttgcggttacgcctgcgatgacagtcggctcgaagctggaacggttccagcaggagctccccgagcgggtatatgatgtcgggattgccgagcagcatgccgccacttttgctgcggggcttgcaacccagggcatgaagccgtttctggcaatttattcgacattcctgcagcgggcgtatgaccaggttgtgcacgacatttgccggcaaaacttaaatgttttcatcgggatcgacagggcgggccttgtcggtgcggacggcgaaacccaccagggcgtgtttgacattgcttttttgcgcagcctgcccaatatggtgttaatgatgccaaaagacgaaaatgaaggccggcatatggtctatacggctttaaaatacgacagcgggccgatcgccatgcggtttccacgcggcaacggccttggcgtggcgcttgatgaagaactgaaggaaatcccgctcggcacatgggaagtcctgaaagaaggaaatgacgtgtgcattctcacattcgggacgacgatcccgatggccatggaagcagcgaaatttttgcaaaagcaaggggtatcggttaaagtggtcaatgcgcgctttatcaaaccgcttgatgaagcgatgctcgaatctgttttcaacaccgggatgccggtattgaccgtagaagaggccgtgcttgccggcggatttggcagcgcagtgctggaatttgcgggtgaccgcggcttctctgaccggatcattcgccgcattggcattcccgaccgctttgtcgagcacggcagcgtaaaagaattgtggcaggaaattgggctgacaaaggaccggctgattcgggaagtccggcagatattgcctcaaaaacagcaaagaaaggctttattttaaatgaaaaaagaacgggtggacgttctcctcgtagaacgcggattaatggaaacaagagaaaaagcaaaaagggcggtaatggcggggcttgtcttttcaaatgagacccgccttgataaaccgggtgaaaaaattgctgcagatgcgccgctcatcataaaagggaagccccttccgtacgtttcacggggcggactgaaactggaaaaagcgttggaagtgttcggccttgatgtaaaaggcaaaattgtcctcgatatcggcgcttcgaccggggggtttaccgactgtgccctccagcacggcgccaaaatgtcttatgcccttgatgtcggttataaccagctcgcatggaagctgcgccaggacgggcgggtcgttgttatggaaaggacaaatttccgctatgttaccccacaggatttcacaaagggcattccggaatttgcctcaattgacgtgtcctttatttccctgtccctgatcctcccggtattaaaaacgctccttgcgcctggaagcgatgttgtcgccctgattaagccgcagtttgaagcggggcgcgggcatgtgggcaagaaggggattgtaaaagataaaaaggtccatcgcgaagtgattgaaaaaatcatccagcttgccttacgggaaaacttttcggtggaaaacctctccttctcgccgattacaggcggggaaggaaatattgaatttttaatccacctcgtccagcccgccggccaaacagaaggcggcgccaaccggttgcgcgtaaccgtaaaagatgtggtggaagaagcccatgccgcactcaggaagggataatttggcagcctattggataaccggtaggctgttttataataaaggcgtttcgcacccggaaaaaagcccgtttacggataaaagctgcttgtacatttgcctgtaaatgcgctaacatacaagtagatgcatatttacaaaagagcatccttgaggtgaggatatgaataaaggacagcgcttgatcaaaatcagggaagtgattaccaattatgatatcgaaacacaggacgagcttgtcgagcatttgcggaatgccggctttaatgtgacacaggccaccatttcaagggatataaaagaacttcatcttgtcaaagtgccgctcaataacggcaggtacaaatacagcctgcctgccgaccagcgctttaacccgatgcagaaactgaaacgggcgatgacggatgcgttcgtcagcattgatacagccgggcacctgatcgtgttgaaaacgttgcccggcaacgcgcatgcaatcggcgctttgattgatattctggattgggaagaaattatcggcaccttgtgcggggatgatacatgtttgatcatttgcaaaaatcacgatgagaccgaaacggtttcgcaacgttttttggacttgctgtagaaagtggtgatgtttgattgctgcaggaattatcgattaaaaattttgccattattgatgcgctaaccctctcatttgaagccgggctgactgtcctgacaggggagaccggtgccggcaaatcgattattatcgatgcgatccagcttttaacaggcgggagagggtcatcggagtttgtccggcacggggaaaaccgtgctgagattgagggtttatttctggtcgaagacggccatccgtgtatggagcgcgcccgcgaattcggcattgagattgaggaaggcatggtgattttgcggcgcgatatatcgaaaacagggaaaagcgtctgccgcatcaacggaaaacttgtgacgatttcggtgctgcgcgaaatcgggtcgactttaattgatatccacagccagcacgaaacgcaggaactgctgaacgaaacgtaccatctgccgctgcttgaccagtacgggcaaagcgagatcgaaacggccctccttgattacgaaaaattatataaaaaatacgaagccgtttacgggcggttaaaaagaatgaatgaaaacgaccagcagcttgcccagcgccttgacctcatccagttccagcatgaggaaatccaaaacgcagggctgaggctgcatgaagacgaggaattagcggaagaaaaacgaaaactcgtcaattttgaacggctgtttgaatcattgaacgcggggtatgaagcgcttgccggggaacagcacggcctcgactggctcagccttgccatgagccatcttgaaaccgcggccgaagtggatggcgggctctctgacattttggaatccgtccaaagttgtttttatacgctcgaagacatgtcccgctcgatccgttcccggcttgacgggcttgaatttgacccggaacggcttaacgtgattgaagcgcggctgaatgagattaaccagttaaaacgaaaatacggcagcacgatcgaagaaattctggaatacgggtccaaaattgaagaagaaattgaatcgatcgtaaaccgcgaccatcatgtagagcttttgcaaaaagaattgcagacggtaaaacgcgatctttatttggaagccaagcagctcagcgatttgcgcaaaaaatgggcggaaaagctgactgaaaatatccattccgaattaaagcagctgtatatggataaaacaaagtttgaagtccgttttcttgccgctgctgatgattattatgaggcggatgacattccgtttaggcgcgacgggctcgatcaggttgaattttacatttccaccaacccgggcgaaccgtctaaaccgctcgcaaaaactgcttcgggcggggaattgtcgcggattatgctggcattgaaaacgattttttcccggcaccaggggatcacttccgtcattttcgacgaagtggataccggcgtaagcggccgcgtagcacaggcgattgcggaaaaaatttaccatatctcggtccattcgcaagtcctttgcattacccatctgccgcaggttgccgccatggcggacacgcatctgctgatcatgaaagaaaccgaaaaggggagaacgcggacaaaagtgaagcctttggagcaggaagaaaaaattaaagaaatcggccgcatgatttcaggtgttgaaatgacagaactgacaagacagcatgcgaaagagctcctcgaactggccgaagcgataaaataagggtccggtccgcctatttggaaaaatggtggagccggaccctttctatccagattgggcagcatttttcccgcaggcactgttatatttaaaacgcttcaaggctaaattaaaatcatagccaaaacaaacaaaggctaaacaaacagggtgaaccggaagcgaggagagtggaatgtttgaactttgaaaaaataaggaagctgacaggcggatttctccttgtttcacttttattatgcgttttttcgcagccttttcaacaatatcttcactttccgaagcaagttcgcttattggaaggccagcaaaccgagctttctaaatccgctgctgccgccgtaatggcaagcggaaacagcgcggaaattcatgcgcatcaacatacggtttccataaaagggaagtcagccgggaaggaagaaatgtttcttgaactggcaggcatcccgatcaaaaaaacgaaagtagaagtgcatccaaatattaagatgattcccggcggccagtcgattggcgtaaagctgaatacgctcggcgtccttatcgtcggccatcaccttgtgcagacggacaaagggaagttttctcccggtgaacaggccggaatcgaagttggggacatgatccttgaattgaacgggaaaaaaatcgaaaatatgtccgatattgcaccgattgtccagcaggcaggggaaaaaggaaaaccgctcgagactgtcattaaaagggatggacaaaccatccggaaaacgataaagccgttaaaagataaaaacgggcagtcgtataaactcgggctttatatacgggattcggctgcgggaatcggcacgatgacgtttatcgatccgaaaacgaaaaaatatggcgccctcggacatgtcatatccgacatggatacaaaaaaaccgatcgtcgtcgaaaaaggcaggattgtcaattcagtcgtaacgtcgattgaaaaaggcaaaaacggaagcccgggagaaaaattggcgcgttttaccgaagaaggtcaaatcggcaatataacgaaaaacagcccgttcggcatttttggacagctggatccggacgcaaaagacagcacatacgcaaaaccgatgccgatcgcactgtcagaccaggtaaagacaggtccggcaaaaattttaacggttgtggacgggaaaaaagtggaagcctattcgattaaaattgtcagctccattccgcaaaaatttccggcaacaaaagggatggtcatcaaaattaccgacccggaattgctgaaaaaaacgggtggcattgtccagggaatgagcgggagcccgatcatccagaacgggcggcttgtcggtgcagtaacgcatgtgtttgtcaacgacccgacatccggatacggcgtccatatcgaatggatgctccatgaggcaggcatttacggagggggcaggtccccttccgcttttaaagaataatgcacttatctatcattataatgcgtgaggacgttttgtccgggcgatttacggcatcccggttttcaacaaaaaataataaataaaaaagcaggaaattttccgccattgtcgaaacttattcttgtacagagatatggctatttttttgaggaggacagtggcagtgaaaaaaatcagagtgtttattgtagacgacaaccgtgaacttgttcgattgttagaagattatatatcccagcaggaagacatggaaatttgcggaacggcctacagcgggacggaatgccttgaacggttaaaagaggcggaccccgatattttgcttttggatattattatgccacatctggacgggctcggcgtgctcgagaaactgaaagaatcggcttattcccggatgccgaacgtcatcatgctgacggctttcggccaggaagatgtgacgaaaaaagcggtggaactgggcgcatcctattttgtgctgaaaccgtttgatatggacatgcttgtttcgcaaatccggcagacaagcaaaaaaggctccgtgctgaaatcatcgcccggcttagcagcttccaaagcggaatcaaagcctgtcaatctcgatgcaagcattacgagcattatccatgaaatcggcgtgccggcccatattaaaggctatatgtatttacgcgaagcgattgcaatggtgtacaatgatattgaattgctcggctcgattacaaaagtgttataccccgaaattgcaaagaaatacaataccactgccagccgtgttgagcgcgccatccgccatgcgatagaagtggcatggagcaggggaaatatcgaatccatttcctccttattcggttatacggtttccatgaccaaagcaaagccgacaaactccgagttcattgccatggtcgctgataaactccgcctcgaacacaaagcttcctgaaaggaaagggaaaggggccggtgcagtgagttgtaccggccggatcccgtgcgcaaaaggttacgcttttcttgttcggggaatatataatgatgaacgaaataaacaaaggatgtgtatcgagtgacgtttatttttgcccatcggggatcggcaggcacacgtccggagaacacaatggaagctttttttgaagcggaaaaggccggagcggacgggattgaactggatattcagttgtcaaaagacggcgaactggtcgtcattcatgatgaaacggtcaatcgcacgacaaaaggcaaagggtatgtgaaagatttaacgtttgctgaactgcagtcgctggatgtgattgaccggttcgaaaccggcaagccgctaagcatcccggcacttgaagaagtttttgaatggctcgcccaaaaccagcttctctgcaatattgaactgaagacggcaaaagtggattatccgctgatcgaggaaaaagctgtttcgttaatccgggcataccatttggaagaaagggtcattttttcttcctttaaccactattccatcattcaatgccaccgtctggcacctgaagtggagattgccccgctgtattcggaggtgatgtttatgccatgggtctacgcgaaatcgatccgggcaaaagcgatccatccgcgtcttttgacaacggccgactggatcatccgcgccaccatgaaccacggtattgcagtcaggccgtatacagtgaataaaacgaaagatatgagaaggctgtttaaaatcggttgcacggcaatcatcacggatttcccggaaatcgcggtacaggaaagaaaagcagaacgggataaagcatccgggcaatagccggatgctttattttgatggtttgctgaaacgtttctgtaccttttggcgctttctgtcccggtgcagaataaatccggcaataaaggcaatgccgccggcagagaacaaaagcccggccagaaactggagcgtcagcgaagaaaacgggcggtctggaatcccaaaaaccatatcccgcatccatttgatcccgtaagcggcggcgatgaccggcaccgccaatacaaaaagtgccaccagcctgcccattccggcccccctttaaaccgtttccaccattataacacccgggtttgggcgcaggcaatgcagcccattgtaaatgtaagccctttcaaataaaataaaatagcggagaccagcacgaaaagggggagcagcgatgcaaaatgttttaatcgttggcggggggaaaggcggaaaagcgattttaaaaatattgtccgaaagcgcacggttccgtgtggccggcatcgttgatctcaatccgcaggcggaggggatccggcttgccaaaaacatgggcgttcaaaccggtaacaactggcgcgttttttcaggcccccatgtcgatattatcattgaggtaaccggggatgagcaagtttttcatgaaatcgttgcagcgtgcacgggccggatcgtcattcccggcagtgtcgcctatttaattgcgaaattgctggaggaaaaaagaagccttaatccgaaagctggaaagtgaaacaaaaaaacatgcgctcatccttcagtcgacggcggaagggatgacggtgattgacaaaaacggcaggatcatctaaagcaaggagcggccgacatacccgaaaaaggtagcctcgatgaaatgctgtccgcttttgaaaagcagctgatccaaaaagcgctcgaagaaaatgtcggaaacaaaacgaatacggcaaaacagcttggcatttcactgagaagcctgtactataaattggaaaaataccggcttgcaaaaatcagcatgcaataatttgcatattcgtgcaaaaagtagcaaactggtaaacggaagtttatttttttaagccccgctcttttcgccatttctgcatgaaaagcggaaacaggaaaacaatgtgaaagtggcattctttttgcattttcaacagtgaaggctgacccgtgatcccggaaaaagcggtgtgccgttttaaaaagaggcatcgggatgtccgttttacagccgcaaaaatgccggttcagccttctgacagctttgcttgcggaaaaggaggaaatccattggaaatttttgattatatgcgaaaatacgattatgaacaactgctgttttgccatgatgacgcatccggattaaaagcggtgatcgccatacacgatacaacgctcgggccggcgctcgggggcacgagaatgtggacttacgcaacggaagaagccgccattgaagatgcattgcggcttgcacgggggatgacgtataaaaacgctgccgccgggctcaatcttggcggagggaaagccgtcatcatcggtgatccgcgcaaagacaaaaatgaagaaatgttccgggcgttcggccggttcatccaggggctcgggggacgctatattacagctgaagatgtcggcaccactgttgaagatatggatgtcatccatgaggaaaccgattttgtgacaggcgtttcacaaacgtacggttcatccgggaatccttcgcctgtcacggcgtacggctgctatgtcggcatgaaagccgcggcaaaagaagcattcggaagtgattcgcttgaggggaaaaccgtagccgtccagggtgtcggccatgttgcatttgaactgtgccgctatttgcacgaagaaggcgcccgccttattgtgaccgatatttcaacggaggcggtaaaacgggctgttgaggctttcggggcaaaagcagtggacccggctgacatttacgcccaggactgtgatatttttgccccatgcgcgctcggggccattttgaatgatgaaacgcttccgcagctgaaagcaaaagtgattgcggggtctgcaaataatcagttgaaagaaccgaagcacggcgaccggctgcatgaaatgggcattctttatgcgcccgattatgtcatcaatgccggcggggtgatcaatgtagctgacgaactgtacggttacaaccgggaaagagcgatgaaaaaagtcgagcaagtctactataatgtacagaaagtgatcgacatttcaaaacgcgacgggatcccgtcctatttggcggcagaccggatggcggaagaacggattgcaaaagtttcccgcgcacgttcacagtttttgccgcacaataaacatgtgctcgaaaaaaggcttccgcggtaatgcaagtgaaggaggaacaacattggcaaaagaatacgatgtcgttgttttgggcggcggaacaggcggctatgtggccgccatccgcgcagcaaaaaacgggctgaaaacagcaattgtagaaaaatcaaaacttggcggtacctgcctccataaaggctgcattccgacaaaaaccctgttaagaagcgcggaagtataccggctggtccgaaaaagcgccgatttcggcgtggatgtccgcgatgccgccttgaattttgcaaaaatccgggaacggaaaaacgcagttgtggcgcaattgcaccgcggcgtccaatccttgatgaaaaaagggaaaattgatgtgtatgaaggcaccgggagaatccttggcccctccattttttcgccggtagcaggaacggtttcaatagagggcgcgggtgcggataatgagatgctcctcccgaaaaatttaatcattgcgaccggctcgcgcccgcgggttcttcccgggtttgccgtcgacggggaatatgtgatgacgtctgacgaagcgcttgaaatggaagaactccccgcatcgatcctgattgcaggcggaggggcgatcggtgtggaatgggcatcgatgcttgccgattttggcgtaaaggtgacggtcattgaagcttccccgcgccttttgccgggagaggacagcgacatttcaaaagaaattacgcgccttttgaagaaaaaaggggttgccgtattcaccggtaccgcgttcaacgcatcctccctccagacagggggcaaaaaggtgcgggtcggtacggaagacggaaagacgtttgaagcagataagcttttattatcggtcggccggctggccaacacggaaaatatcggccttgaaaatacggatattgaaatcaaaaacggcgtcattaaggtcaatgaagtttaccagacaaaagaatcccatatttatgcgatcggggactgcatcggcgggttgcagcttgcccatgcagcagcaagggaaggcatcattgcggcggaccacatcgccgaaaaaagcgtggacccgcttgatgacaccatggtgccgaaatgtgtgtattccaatcctgaaattgccagcgtcggcctgacggaagagaaagcaaaagaagaaggatatgatgtaaaaatcggccggttttcgttccaggcagtcggcaaagcgcttgtctacggggaaacggacggctttgtcaaaatcgtggcagacgcaaaaaacgacgatctgctaggcgtacatatcatcgggccgcatgcaacagacatgatttcagaagccgggcttgcacgcgttttggatgcggcgccgtgggaggtggcaatgagtatccatccgcacccgacgctaagcgaagcgatcggggaggcggcactcgcagtagacgggcttgaaatccatgcgtagcttttggataaggagtgaagacaatgaatgaaaatcggcataaaagtttaggtttaagcgaccgggaagtattggaaatgtacgaaacgatgctacttgcacgcaaggtggatgaacggatgtggctattaaaccggtccggcaaaattccgtttgtcgtatcctgtcagggccaggaagcagcccaggtcggcgctgcttttgcgcttgacaggacaaaagattatgtattgccgtattaccgcgatctcggggttgtgctcgcttttggcatgaccgcgcgcgacattatgctttccgggtttgccaaagcggaagacccgaattcgggcggccggcaaatgccgggccattacggacagaagaaaaacagaatcgtcacccagtcctcccctgtaacgacacaggtaccgcatgcggccggaattgcgctcgcaggcaaaatggagaaaaaggattttgttacgtttgtcactttcggggaaggatcatccaaccagggcgatttccatgaaggggtgaattttgccgcggtccacaagctgccggtcattttcatgtgcgaaaataaccagtatgccatcagtgtcccgattgaaaagcagctcgggaacccgcgcgtttccgaccgggcgatcggttatggcatgccgggtgtgacggttgacggaaacgatccgctcgctgtttatgaagtggttaaagaagcggcggaccgtgcccggcgcggggaagggccgactttaatcgaaacgcttgtttaccgctttacaccgcactcttccgatgatgatgaccgctaccgtgcgcaggaagaagtgaagacggcaaaagaaaaagatccggttgttttatttagccggtacttaaaagaggcgggccttcttgacggggaaaaagaaaaagaaatcgatgcgcgcgtcatgcaaaccgtcaatgaggcaaccgattacgccgaaaaagcgccgtatgccaaaccggaagatacgctccggtttgtttacggggagtaaggaggagaacgatggctgtcatttcatacattgacgcaattacaaaagcattgcgggaagaaatggaacgggacgaaaaagtatttgtgctcggcgaagatgttggaaaaaaaggcggggtatttaaggcgacggccggattatacgagcagttcggcgctgaaagagtcatcgatacgccgctcgctgaatcggcgattgctggggtcggcgtaggggctgcgatgtacgggatgcggccggttgccgagatccagtttgccgattttattttgccggctgtcaatcagattatttcggaagcggcgaaaatccgctaccgtaccaataatgactggcaatgcccgcttgtcgtgcgtgcaccgtacggaggcggcgtccacggggcgctgtaccactcccagtcgcttgaatcggtgtttgcaaatcagccggggttgaagattgtcatgccgtccaccccctatgacgtaaaagggttgctgaaagccgcaatccgggacgatgatccggttctctttttcgaacataagcgcgcgtaccgcctgattaaaggcgaagtgccggatgacgattatgtgctcccgatcggcaaggccgaagtgaaaagggaaggaacggatattacggtgatcacgtatgggctttgcgtccattttgccctccaggctgcggaaaagcttagagaagacgggatcgaagcacatattctcgatttgcgcaccgtttatccgctcgacaaagaagcaatcatcgaggcagctgccaaaacagggaaagtgctgctggtcacggaagacaataaagaaggaagcattatcggcgaagttgctgcgatcattgcggaaaactgcctgtttgacctggacgccccgatcatgcgcctggccgggccggatgttccggcgatgccgtatgcgccgtcgatggaaaaatattttatggtcaatcccgaaaaagtcgaaaaagcaatgcgggaactggccgaattttagaattgcaggataggagggtgccaattggcgatagaaaacattacgatgccgcagctcggggaaagtgtgacggaagggaccatcagcaagtggcttgtatccccgggcgatcatgtccataaatacgatccgctttgtgaagtattaacagacaaagtcaatgccgaagtgccttcttcgtttgaaggggaaatcgtggaactgatcgcttcggaagacgaaaccgttgctgtcggggaagtcatttgcacggtcaaaaccggatcaagtgaaacaattgcccggcctgaagcggaaccgggcctggatccggatgctgcggtgccggagccggaagcggaaaaagggaaaaaaatccgctattccccggccgttttaaaactgtcccaggaatacggcattgacttgaaccgggtcaaaggaacgggaagggaaggccggattacgcgcaaagacctgttgaaaatcattgaaagcagggggaatgaggcagaaccggcaccttcaaaaccggaaccggcaaaacccgcaccttcaaaaccggaacctgcccggcatacgccgcctgcttcccggcctctgcctgtacgggaagctgcagaagaagatacggtgattcctgttaccggcgtgcgtaaagcgatcgcgaacaatatggcacgcagcaaacaggaaattccgcatgcgtggatgatggtcgaagcggacgttacgaaccttgtccgctaccgggaggccgtaaaagaagagtttaagcggcgcgaaggctttaacctgacatactttgccttttttgtcaaagccgttgcccaggcgctgaaagagtatcctgcgctcaattccagatgggccggggatgccattatccagaaacatgatgtcaacatctcgatcgccgttgccgccgaagacaggttgtacgtgccggtcataaagcatgccgatgaaaaatcgatcaaaggcattgcccatgaaattgctgtgctggcgcaaaaagcccgcgccgggaaacttgccccggaagacatggaaggcggcacctttaccgtcaataataccgggtcattcggttcggtgcagtcgatggggattatcaactatccgcaggctgccatcctccaggtcgagtcgattgtcaaacgccctgtcatcatggaagagggaatgtttgcggcgcgcgatatcgtgaacctttgcctgtcgattgaccaccgcattttggacggactcgtctccggccgcttcttaaagcgcgtcaaagagattttagaggcggtcacaccggaaacggcaccgctctattaatgaaatgcccgctgatgaagcgggtttttctatgttggaaatgtggcgatttatcaaaactgattgtttttgaacgattttaattgatttttactgtttttgaaggtaaaataacgaccggatgcaccgcttgcaatcatgcagtgggggaacgattgccatcaaaaaggggaatactaaaaatgatctccaaagcaaaggttgtgtaaaaaatgatttatacggtaacactgaatccgtctgttgactacatcgtacaggtggaacattttgagcttggcggattgaaccgttccgtgatggacaccaagtttccgggcggaaaaggcatcaacgtctcgcgcgtcatgaaaaggctgggcgttgattccacggcactcggttttctcggcggttttaccggcagctacattgaaaattttcttaaagcggaaggtattttaacagattttgtccaagtttcaggcgacacgcggatcaatataaaattaaaatccggtgtggaaacggaaatcaacggaatggggccctctatttcggaagctgagctggaccggctgcttgccaaaatcgacagcctggacaaagaggatgccattttgttttccggcagcatcccaagttccctcccgccatccatttatgccggcctcattcaaaaatgccgtgaaaagcaaatccgcgtgattgcagatgtttccggcgaatcgctcggccatgtcatcaaaacgggcccgtttttgatcaaaccgaaccatcatgaaatcggcgaaattttcggcgtgaaagtcgaaacgcccgaagaagcgaaacaatacggcagccgcctgcttgacatgggcgttgaaaatgtgatcgtttcgatggcggaaaaaggcgcgctctttttgaacaaggaagtatcctattttgcgcaagcaccgaaagggaaggtgaaaaattctgccggcgccggcgattcggttgtggccgggtttataagcgggatggcaaaagggaaatcgtacaaagaatcgtttgcgcttggggttgcctgcggttctgcgacggcattttccatggaactttgcacaaagcaagaagcagaatcgcttctcggacaggtccatgtccaatctttataaaacggaaaccgggatgccccggtttttttgcataaaaaagggatagcgcatgaggcgccatccaaagcatctagggagtttaggggtatggatctagatgtactgtcattttacccggttttttggaaaaataaacgctttccggctatttttttcgttttcatgcgtaaaataagagaaaagtggcggctgcaaacagaatgtttgaaaagcagcgtgaaaacctgttatgattagctttaaagtagaatgaaaggatgagtggcatgtctgtcaattttaatctttatatgaacgatgtcgtgcgcatgtcccgtgaagaggcagtagaagccggctaccgggaactgaggacgccggaagaagtggacgaagcgttttccaaaaaagggacgacacttgttttggtcaactctgtgtgcggctgcgcagggggcattgcacggccggctgcggcgcacgccatccattatgataagcgcccggaccagcttgtaaccgtctttgctggccaggataaagaagcaacggcaagggcacgcagctatttcaccggttatccgccgtcctccccatctttcgcacttttaaaagacggcaaaattgtgaaaatgattgaacggcaccagatcgaagggcatgacccagcggctgtcgtggctgagctgcaggcaatgtttgaagaatactgtgaagaactgtaatgcgggaagccttctccttcctttctggaaaggggaaggcttttttttttaacaggggcggtgtcccgggtgtataagcgcactttccgtatgcatgaaccggcatgcgggatgcatactaaagaaaaacaccactagcaggtgaatggcttatgcatatatgggtagcatggatgcttgttttcgggttatcggtatggccggcggacgggcacgttgccccgggagacccgctcattattgtcaataaaacaacaaaccggcttgcctggatccgcggcgggaaaatccggctcgaaacgccggttgcgactgggaaaacaaatgacctgacgccggaaggtttttttacggtcaaagtcaaggcgaaaaatccttattaccggaaaaagaatattcccggcggcgacccgcgcaatccgctcggctcgcgctggatcggttttgatgcgcgcggcacggacggccggatttacggcctgcacggcacaaacaatccttcttcaatcggccggtatatttcaaacggctgcatccgcctgccgaaagcggcgctcgaaaagctgtacgaagaagtgccggttggaacaaaaatttacatcatccggtcaaaccggccgatgaccgaactggcgaaggcaaaaggcgccatttaaaaaaggaacgcataccccgttccttttttaaaacagcatggaaaggccggaaagcactgttcctgccagcatggcaatgagcattaagtacaccacaattttctgcgtttttttcgacaaagcggacttcacctcttaatcggacggtaatcatttttattctagcctgaaggtatgtgtaaaattttagccggccgcccgcggaaagcgagtgaatttcgcgcgcctcaacatccccgttgtccatctttatacggaaatatcacatcttttccgaaaattacaccgagcaagtgaagcacggtagccgaaagtgtacaaaaagagtgtcttggaatacccgatatttaaaccttgtcgagaaaaacttgacacatacagcctgaagccgccggttgtacaagtaaaatcattcgcgttatactattaacgtacatatacatattggaggtttttccatggtaaatgaagaacggttagtaaaagaatttttggaactggtccaggtggattcggaaaccggccatgaagaagaaattggcaaggttttaaaacaaaaatttgaaggccttggccttgaagtatatgaggatgatacaaaagcaaaaacggggcacggctttggcaacctgatctgcactttgaaaggcaatgtccctgaagcggcgccgatttattttacttcccatatggatacagtcgttccggggaaaggcatcaaaccgtccatcaaagacggctggatccggtcagacggtacaacaatcctcggatctgacgacaaagccgggctttccgctatgctggaaatgatccgggtattgaaagaagaccaaatccgccatggggatatccagtttgtcatcactgttggcgaagagtccggccttgtcggttcgcgcgcgctcgatccttcgctgttaaaagcgaaatacggttttgcgcttgacagcgatggccctgttggcacgattgtgacggctgccccgacgcaggccaaaatcaaaacaaccattttaggcaaaaccgcccatgccggtgtcgcgccggaaaaagggatttccgcgatcaccattgccgcaaaagcgatctcaaaaatgccgctcggccgcattgacagtgaaacaaccgcaaatatcgggcgctttgaaggcggccaggcaaccaatatcgtctgcgaccgcgtcgatattctggcggaagcccgttcgctcgttccggaaaaaatggaagcgcaggttgccaaaatgaaagcggcttttgaacagacggcgcttgaaatgggcggaaaagcggaagtcgaagtgaaggtcatgtacccgggatttaaattctcagacggcgaccaggtggtggaagtggccaaaaaagcagcggcaaaaatcggacgcgagagcaagctggtgcaaagcgggggcggaagcgatgccaacgtcattgcaggttttaacattccgacggtcaatctcggcacaggatatgaagaaatccatacgacaaaggaaaggatcccggttaaagaactggtcaaactggctgagatggcggttgccattgcggaagtggccggcggggagtaacaggatttgaggcggaagcgggataaccgcttcctttttaagaaaggaagcgataagttggaagcgctcaataaatatatcatttttaaaacgggggaagaggagtacggcattcatatcggatcggtcatctctgttgaaaaagcgcaagcagccaatcctgtcccgaaactgcctgcatttgtacggggcatcatgaaggtgagggatgaactgatcccgattattgacgtcgcgcactgtttttaccagacaccgctttcctccatagaggacgcccgcatgatcgtcgtccggacggaagccattccggtcggcctgctcgtcaaagaggcaaacgatattgtggaaatacaggaagaagagaaaaaacagatcggccttgccggctacgggcggacaaattattttacggctgtcgcaagtttgaaggacaggctgattaccattgtggatgccgatttgtttatggcgtcgcttgaagggattgcagacattgccgcttatatgaaggaagctgccgaaaattcgtgaagcgccggagtgggtgaagatgaaagcattttatccgaaaaacggtcgtgtcattttgcatgtcgatatgaacagttttttcgcctcggttgaaatggcggaaaaccctgcgcttaaagggaagccgctggccgttgccgggaatccgaaagaacggaagggcatcattgtgacgtgcagctatgaagcgagaaaatttggcgtaaaaacgaccatgccggtctgggaagcaaaaaaacgctgcccggatcttttaatcgtgccgccccgttttgaactgtataaaaaagcatccgccgaaatgttttcgattctccgcgcgtactcgcctttggtcgaaccggtttcgatcgatgaaggctatgtggacattaccggcctggaggaactggggacgccgcctgccattgctgaatcgatccagcagcaaattcttgcggaactcgatttgccgtcaagcatcgggatcgccccgaataaatttttggcgaaaacggcgtcggatatgaaaaaaccaatgggcatcaccattttaagaaagcgggatattccccgtttattatggccgaagccgttgatcgagatgcacggcgtaggcggcaaaacggcggaaaagcttagcgcccgcggcctttttaccatcggcgatctggcgcatgcggatgattttcttttaaagcagctcctcggcatccgcggcatccgtttgaaagaaagggcgaacgggagagacccgcgccctgttgaccccgaatctataaacgtcaccaaaagcgtcgggcggatggtgacgctgcccgaggatacggaggaggaacaccgcatcgatgccgtattgaaaaagcttgcggatgaaacggcggaacggatgagaaaaaaggaggttgcggcaaccaatgtcggcatcatgatccgttacgcggaccggaaaacagtgacgaggagcaaaaaaagcgcagggccggttgaaagcggcgatgcgttatttcaagccgcccgcacgctttttatccggaactggaacggtcagcccgtgcgccttttgggcattaccgcgtccggtttaacggaccgcaaggcggaagcggagcagctgagcctgttttcatatgaagacgcagccaaaaaagagccgctgtatgaggcaatcagccggctccgcgagaaattcggggagcagattatccaaaccgggagagaagcgggaaagccgccggatccccgcaagtaattaccggcacaccccataaaaaaggaacacgccttgcgcgtgttcctttttaacaggttcagcagttcccgacttccagatcttcgaccggccaccagaagaagccgtctttttccagcagttcatcagctgctttcggccccatcgaaccggatttgtaattcgggaatgaaatcggcttgttttcccacacttttgaaatattatcgacaaagctccatgataaggcgacttcatcccaatgggtaaagttggtcgcgtcgcccatcaggcagtcatggatcaatttttcataagcttcgggcgtattgatgccgtttttgctgctgcttgcaaaactgagctgcacaggggtggtttccatatgctggcccggttttttggcgttcagatgaagcgaaatcccttcttccggctggatatggatgacaagcagattcggattcagttcatgatttgtattgtagtacaaattcatcgggatatctttaaactgcacgacaattttcgtcgattttgtcgccatccgtttgccggtacggatgtaaaacggcacgcccgcccatctgaaattatcaatcatcagtttcccagcgacaaacgtttcggtccgggaatccggcgctacattcagctcttcccggtaacccgggactttcttgccgcctatttcgcccgggccgtactggccgcgcacgaagtatgccggcacatcttttccttcaatggggcgcaaggcacgcagcacccgcactttttcgctccggatctcgtttgttgtcaggctgatcggcggttccattgcaagaagcgccaccatttgcagcatatggttttgcaccatatccctgagcgccccgctcgcttcgtaataccgcgctcgttcttccacgccgagcatctcgcttgatgtaatctggatgttggaaatataacggttgttccaaagcggctcgaacagggcattggcaaaccggatgacctcaatattttgtaccatcgctttgcctaaataatggtcgattcggtaaatctggtcttctgaaaaagatttccggatctggctgttcagctgtttcgctgattcgaggctgtgcccgaaaggtttttcaataacaagccgtttaaacccgtttgtagcggtaagcccgtcacttttcagatggtccgaaatcgtcccgaaatattccggggccatcgccaaatagaagatgcggttgccttccagttggtacttttcatccagttcatccgccaattgcttcaactgtatgtatgagttgctgtctgtcacatcatgcggctgatagtaaaaatgggcggcaaacgcttcaagctgttcagcatgttctctcgcgctcagaatggaatctttgatatgcgcacggaagatttcatccgtccattctcttcttgccgtgccgatcacggcgaaatgctctgacagcctgcctttccggtataaattgtacagggaaggaaacagcttgcgcttcgccagatcacctgttgcgccaaaaagcataaataacgatttcggtgtctcggttgtctgcatctttcttacctctctttgttcaaaaaatcacgatttaaggccggcttgtgtcctgatacggttatcgtttgccttgttgtagccgtttcatttcaaaggcagggaaaaatcatttgttttttccgctttccggctccatttcattgtcactatattctagactttcacgggcaaatacgcaaatgatatgcaatagtttcctttccgtaaaattatgataagatagttctatatgtgcggccgggatccggcaggaaagggggggacatcatttggaaattttatttttaggaaccggcgcgggtgtgcctgccaaagcaagaaacgtcacgtccattgcgctcaaattgctggaggaacgaaatgcaatctggctttttgactgtggggaggcaacacaacaccagattttgcacaccaacatcaaaccgcgcaaagtagaaaaaatttttatcacccacttgcacggcgaccatattttcgggcttcccgggtttctcgggagccggtcgttccagggcgggaacggtccgcttaccgtttacggcccgaaaggcacaaaagcgtttgtggaagtttccctgaaggtgagcgaaacccatctgaaatatcctttggagatcatcgaaattgaagaagggacggtatttgaagacgaccgctttatggtttgtgccctgcggcttgaccacgggatcgaaagcttcggctaccggattgccgaaaaagacaaaccgggcgcgctggatgcggatcaattgaaaaaagaagggatccgcccgggccctgtttaccggctgctgaaagaaggccggacggtaacattggaagacggccgcgtgatcagcggaaaagattatcttggcccggcgaaaaagggaaagatcattgccatccttggcgatacaaggccgaatgaggccgcaatccggctcgcagccaatgccgatcttctcattcacgaagcaacgtttaacaaagagagcgggcaaatggcgcatgattattttcactcgacgacggcggacgcggcgcaaacggcaaagcaggcggaggcaaaacggctgcttctcacccatatcagtgccaggtacggaaaagaagactggccggcgcttgagcaggaagcgcaagcattattccccgacagcctgcttgtccatgatttgatggaagtgcctgttttttaaagcaaaaaaagcggcttgcctgccgctttttttgctgccggttattctcttgcggggatttcttcttctgcgttcgacaattcatttgcccgctttgctgctgcttttacacagtcaatgaaagcttgtttgacctcgcgttcgtcaaggacgcggatcgcggcttcggtggtgccgttcgggcttgtgacggcttttcggagcgcttccggcggttgtgctgaagttttcagcatttctgctgcgccgatgatcgtctggaggatgaattgttttgccgtttgtgcgtcgagcccgatttctgcagctgactgctggagcgcttcggcgatataataaatatacgccggcccgctccccgaaagcccggttacggcatcgagctgttcttcttttaccgcgatggccatgccgactgtcgaaaaaatggcaaacgcccggtgccggtgctgttttgtcgcggcggcgttaaaggcgatgccggttgccgacagcccgactttcgccgatgtgttcggcatcgcgcgcgcaacaggaatgtgccggccaatcttgttttcgataaacggaatcgtgatgccggccgctaccgataccagcagcgtgtccggggatacgagcggccggaccgattcgagcacatccgggacgtctttcggttttacagctaagatgaccgcgtccgggccttcaaaaagctggctgaggccgtctgcagcctggatgccgtatttctgttccaaagtgtggagcctttttttgttcgtgcggttatgggcgcggatgtccccaggttttacgattcttttttcaagcatgccgctgatcatcgcttcggccatggacccggcgccaataaatgagattttcatgcaaatgcctcctttcaaagcaaaaaaccccttcatccgtaaaggacgaaagggcatgttccgcggtaccacctttattgcaggaatccatcctgcatctcatttggttaacggttttcatccggtttggttttgccaaacagctcacaggcaggttcgaccgggcagcggatggcggagtcttccagcctgagaaccccgctctcttgcatcatacctggcttactggtcctggtcacagccgatcgcttatcaaaatggtattacttattatgaagaaaaatcggggagttgtcaaggatggttccacgaattttcagataaaaaatccgtgcccggcgtgcatgccgcaatgaacgcctgacgggtgtaagcatgaaaattagccggcgccatttttcagaataggcatccatgccacggcaaacggcaccagctgaggaaaaatggacaagcacaaattttcaggatagaagggagaaaatggcaacatggcaaataaacggatccggaagaaaacggtcgtgattaccggtgcttccggcggcctcggggaaaaaatcgcctttgccgccgccaaaaacggggctaaccttgttctgctcgccagaagccttgacaaacttgaaaaaatcaaggcggagatcgaagcagtttacccggtttcgtgtctggccgtccgctgcgatgtggcggaacacggcaaaattcctgctgtttttgaagcgatttataaccgctgcggccatattgatgtgctcgtgaacaatgccggtttcggcgtttttgatgaagtgcaggatatccgcatggaggatgtcagggggatgtttgatgtcaatgtcatcgggctcattgcctgcaccaaggcggttgtcccgcatatgcaaaaaaaccgcgccggccatattatcaatattgcttcccaggcggccaaaatggcgaccccgaaatcaagcgtctatgcggcgagcaagtttgcggtgcgcggctttacggacagcctccgcatggaaatggcgcggttcggcgtctatgtgacagccgttcatcccggcccggttgcaaccggttttttcgacattgccgaccggtccggcacttaccggaaaaatattgaaaaatggatgctggatcccgaaaaacttgcagaaaaagttacagatacgatgcttgtaaaccggcgtgaaatcaatgcgccaaaatggatgaatgcatccgccaccatccatgggcttttccccgggcttgtggaaaggctcggacgacgggctttctttaaaaaatagcagccggtgtgatgcgcgttttggaaaaatatagcccctctgcctgaaaaaacaattggcgaaagaacgtatattcgtttataatgaggaatagaataagaactatagttcgtgttggttgttcagtttctaaggtaagaggggttgaaagatgagccagcgtgtgatttttctcgtcgatatgcagtctttttatgcaagtgtggaaaaagccgatcatccggcatacagggataaacccgtaattgtatcgggcgatccggcgcgccggtccggggtggtgctcgctgcctgcccgctcgcgaaaaagcgcggcgtgaagaatgcgctccgcctgtgggaagcgcagcagctctgcccggatgccgtcatcgtccggccgcgcatgcagcgctatctcgatgtatcggtgcagatttcttcgattcttgcccgctatacggatatggttgaaccgtattcagttgacgagcagttcatggatgtaacgggcagcaggcggctgttcggggagccgcgcgagatcgccgcgcaaatccagcgggacatcatggaagaaaccggcgtgtatgctcgctgcgggatcgggccaaacaaagtgctggcgaaaatggcgtgcgaccattttgcaaagaaaaacaaaaccggcatttttgaactggaccatcatcatctcaaaacgcatttatggcctttgccggttggcaggatgttcggtgtcggcagccggatggagcagcatctgaagcggctcggcatttatacaatcggcgcgcttgcctgctttccgcttgccgttttaaaaaaacggtgggggattggcggccaggtgctgtgggagacggcaaacggtattgatgagtcgcccgtcttgcgggaatcgcacgccgggcagaaagcgatcgggcatgcgatgacactgccgcgcgactacgccgattttgagcatgaaatcaaagtcgcccttcttgaactttgcgaggaagtctgtttccgggcgcgtacttcaggcgtcatgggcgcttgtgtttcggtcggctgccagggggcggatgatgcacatccgtccggctttcaccgccagatgacgcttgcggcgccgacaaacgggacaatggacgtttaccgggcggcatgccggctgtttctttcgttttgggacaaaaatccggtccgccgtatcagcgtcgggctgtcgcgcctgtcgcgggatactatccggcagcttgatctgtttgaaaacagggagggggaaagaaagatcgggtatgcggtcgaccgtatcaagcagaaatacggttccggcgccgtcatccgcgccgtgtcgctgcttgaggccggtcaggcgcttgaacgtgccaaaaagataggagggcattacaaatgagcgtccgcttgcagcgcggcaacaaactttgggaagggtcacgcatgtttttgcccgagcataagcaggcgcttttaaaatggcagaaagaacaggagaaacaggcaaaacccgaactcgatgagcagcagcttgaagagatgaaccgcatgctcgtatctgcctgccggctgcacgtgccggttacggtccgtttctttgaagcgggggattttcttacagccaccggtaccattacaaaattccagccgcttgaaaaaaagctggagctggcaggggagacaggggagcggatatcgatcaaactttccgcggtgacggaagtggagcaggcatgaaaaaaaccggcaagcctgaaaagacctgccgggcggattgttttcgtacgggcgatgcagggaaatgcggcaaaaagcagcattccatgaaacagcatccgtccgttttttgtggattaccgttttcttgcttgaatgagcgcctgctgcacgacccagttttggggaaacggattgccgagcacccagtagctgattccgcgcagcccgtattcgttcagcaaattgatttttgcccgcatgctgcgcgcgtcttcaaaccagacttcatgctgctggcctgatgcatcggtgtaacggaaataaggcgcctggtcggtcgggtggtagcggatgtcagccccgtactgtgccgccagggaaacagcttcctgcgggctgatcgtgcgcgccgttgtgcctgcgcgccaagggattctccagtcgcgcccgtaaagcggcgcccccatcatgattttattccgcggaatgacggtaacggcatagtcaaggacacgcctcacttcaggaatcggggcgatggcacgtggcctgccgccggcccatccccattcatacgtcatcaaaataacaaaatcaacgatcgccccgtgtgcgccgtaatcgtgggcttcgtaaagcagccccggctgcgtgccggaaattttcggcgcaagcgcagtcgagacgagcaggccttccgggcggaaccggcggacgacgcgcctgagaaacgccgtataacggtcgcggtcttccggatacacgtattcaaaatcaaaattgatgcccctgtaccctttttgccgcatcgtggcgagaagattgctgatcaaagtttcctgcaatgtttcattgcgaagcagccgggcagccagatcggagctgaatccttccgaagtgaaattggccaggattaaaagtggaaggacgccgtttgcttccgctgcctgaaggacggagcggtcgttgagcgacgtcaggctgccgtcttcgcggaatgtatagcggaaaggggacaagtacgtaaaatacagcccgagctggtaaacttcggcggtgcccgcagcgccgaacctggttgtataggcattgacttcttttacagggcggccgggtgcgggcacacgcagcacctggccagcggaaagagccgtgctgggcagccggttcgcctggataatggcccccatgtccgtcccgtaagtacgggcaatgctgtataaagtttcaccttgtgttaccgtatggttccggtaggggataaaaagcacctgccccggaaaaagcaaggcggggttgcggagctggttggcgtttataagcgcttgtgccggaacgccgaggcgtgcggcaatcgtgccgagctggtccccttcctggacgatgtactgaaagaaccggtcaggaacggcaagcgcctggccggggacgagcggggatgatgcagtcagcccgtttgccaaaaaaagctgggcaagatcggcatcgaggcggtttgcaatccgccaaagggtatcgccttgctgtacggtatagatttccatcatagacactccctgttttgataggctcctataccatattcagccacatgggcggacgttcgcaaaaaaatggcattaaagcttacggggcgccgccattttttcaagaaattcatcaatcgcctgttcatactgttcgcggtttaagttgagcgactgggcgtgggcgccgttttcggcaataaacagctgcttcggcccttttttcttttcatacagcgctttggtcatcgcgggcggaatgtagtcgtccttggcgctgtggataaagaggaccggctgtttgatccggccgactacatcaatcggcgacacacggcggagcgagtagccgtcacggatgcggacaaaaaaatcggcaagcggaaaaaaacattttccgggaagccgcgtttcccgcgtaaattcccggatcaattgcgcccggaacgaggaaaacgggcagtcggcgatgtaaaaatcggcgcggccgcaaagctcgccggcatacagtaggagcgtggcggcgcccatcgattcgccgtggatcccgaaaaagatgccgtccccttcgcgccggatcagttcatccgctaccgcttttaagtcatgcttttcatagtatccgtagctcgttgtactgcccccggattccccgtggcggcggtggtcatagaggacagcgttaaagccccgtttcaagaacaggttcatatatttaacggaattcattttgttttccgttacgccatggcaaaaaatcatccattttttcgactcgggaaacggctttacaaaaaccgatttgagtttgtaaccgaatggggacggaataaacacttcttctttcggcaatgcttcgtacgctttaagatccagccttttcgctgccacttcacggcttatgacaaggctgtcctctttttttcggatatgcatcacccgctctgacatgtaaaagccgatcccgcctgcagcaagcgctgctgccgtgcagggcagggagaaccactttttcatcaaaatccctcctcatgatgaagtaaaaagatgccggatttaataagcggaaagaaaaaaccggcgcaagtttccggttgcgccggtttattttcaggctcctgccgcttttccggatggatctttttttgaaagcggcaacgggctttccggccggtttgtcctgctttgcccgtcccagtcaggacgccccggcatccggccctttcaggttcatcagtttttgtttcagttcgttttccatcgtcgccagttcctgttcggcctggaaccgccggcttcttccttcctgctggatgcgcagcgtttcttcgagcgttgaaatcaggctttcctgcgtttttttcaacgtttcaatgtcgacaaggccgcgctcattttcctgtgccgtttcgatcgtgttcgatttcagcatttcggcgttgcgcagcagaagttcattggtcgttttggacacctgtttttgcgcttcgaccgcatggcgctggcggataagcgtcagcgcaatcgcaatctggtttttccatagtgggatggccgtcatgatagaagactggattttttcagccagcgtctgatttgtgttttggatcagccggatttgcggcgcgctctggatcgtgatttgccggcttaattttaagtcgtgcagccgtttttcaagccggtcggcaaactggatcatgtcgttgacttcctggaaggccatctggtcgccggttgcttctgcttttttcttcatttcaggaatcgtttttgtgttcagttcctcaagcttcagttcgccggctgcaatataaatattaagtgcatggaaataatctttgtttttttcatacagctgttcgagcagctggatatctttcagcaatgtctttttcgagaggtcgagctttacgctgatgcggtcgatctgcgcgctcgttttctggtattttgaaagcagttcctgcaccgaattggaaatttttccgaacatgcgcgaaaagaagtttttcttttccggggcgagttcttcgggattcacctgctcaagttttttcatcaggtcatttaatatatcgccgatttccccgatatcttttttttggacctggtcaagcatggcatgcgagaaattcagcagcttcgattgcgcctgcgtgccatataaaatgacggcctggtgattggccgggtcaatttgttttgcgagttcgtatgccttttgcctgttttcctccggcagcatatccacaaggcgggacggttttgctccggcagcaggctctgttttctgcccttcttccggcagcatggcgtcacgcgcgccgaacggatcggcaagcaggtcatccagcccgccgcttgttggttcctgccaaagttctttatctgctgtcacttttttgcactcctttcatgcctggaaggggatttgcgttcgatcgtgtgcctggcgtatgccagttcgtaatcgagctcgtccatatccgttgaaagcatatggtacagatctttctctgtttcacgtcccaattgctttaacgtttcttccgtttcccggatttgcacggccatttctttgtttttcacaggctgggattgcaggagggcatatttttccgcaagctccgccatcgaatccaaatggtaaaaataaaaggattcagcctgatagaaacgtttcggctcttttttgaccagtgcctgtattttcctgatgactttattcatatcataaaaaagtttgaacgtgctgattgaacggacggataaaaaagttttttgcagccgcctgattttttcgtccgcttctttcaggtttttccggatatactgataatctttccgcgtcagctgctgcgctttcagaaaacgccggaacatctgccacttcacaagccggttgatcagaaagccgccggcaagcgaaagcaaaagcgacagccagaacagatggccggatgaaaaataaatggcgagaaagagaagaaaaacgctgagaatggtcatcacggtgcgaatcaccgtaccaataaagaatttcatcatcgacacccctgatcacgatcttggttgattcggccataagtcttatacgaaaagcagccccggaaggattcaaaaaccttgcaaatttcttctttaacgctactataccagagataccgcattgatttaaagagagaaaccagcatccggaaaaatttttcagcccgggaaagcccggtttccctatgaacggaccgcctgatggatgatgaagcgccggtaaatgtattataatgaaaaaagaagatggaagaagggcggtgaaagcggtttgcaaaatgcctccggctgcatttgcggcatgcgggctttgcaaacggcggaaaatggcaaaaaagagacaggcgcaacaaaaaggaaaacaggatgagaaagtgcggctggaggatgcgctgcaaaaagatgtgctcgaaaaattgaggcaggcaaagcaggaacttgcagcagcggaagcagaaaaaaagagggcggaagaagaacggaaaagaaaagaacggaagcagcgcgagcggaacaaatcgtttgcggaactactggaagaatccgatttggattggaaacgatataaaggctaaaaaagatggcaataggacaggcattcgctttcacgcaactgcctgtcctatttatgacgccctgattttcatttgccgtatgcaaggaaattcttcctttgtacggggaaaacggatgatttccggcataaccaagaaagaatggccgggacatggtaaataagtaaacagaaaaaagcaaagaacgcgatgcattctttgccgaaaacagattaccggtgcgcctcgtaccggttttgcttggtgagttcgcgcagaagccggtgctcatccggtgtaagcggcgcagcgtttacggcttttgcattggcccgcacctggtccggggaactggcgccggcaaccacggcggcaaccggagggcaggcgagatcatattggagcgcaagttcaagcatcgtgcgcccgccggttaaaagcgtatttttaatcttctcaagaagggcggcgatttcttcatggcggtaatcaagatagccgcctgccggaatcttttccgccaggccgcttaaaattccttttgcgaccgggcctcttgcgacaatactgatgccgttttcgcccaaaagcgtcgtgattgcctcttccggccgccggtcaagcaggctgtactgcatcatgacgcttgtgatggatgattttttcacatattcgcggataacgttcgggcggatggaagaaatgccgtaagcgcggatgatgccttccgccttcaattcctcgaacgcttcgatcgtttcgtctatcgggtcttcgatcgtgccgccgtgtagctggtacaaatcgatatagtccgtgccgaggcgtttcagactttgttttgctgcttcttttatgtatgctttggaagcatcccagcgccacgttttgccgtcttcattccagcggtttccggcttttgtggcaatgaccacttcgctgcgcacaggtttaagcgcttctgcgaccagtttttcattcaccccgtgatcataaaggtcggccgtgtcaaaatagttgatgcctgcttcaagcgcggcttcaatcacagcccgcgctttttccggatccgtaccgagcgacatgcagccgagcccgagctttgaaacatataaatctgaatttcccaaccggtttttttccatgttttcctgcctccttttttttattgtataaaaggggcgggggaaaatacaaacgtggggacagaacctttaggaggaagctgtttttgcaacccattcggcgaccgtttcatattttttgcggtatgttttcaacctgtcgcgaatttcccatgcttttcccttcataaggatgcctttcggatggacgatgatgatcatgaagctttccctcccggaacagtctgttttttatggtaaaatatatgcgtcagtttcagatgaagaacaaaaggagccgggtaacatgcataaatatgaagagagaacattgaagacggaagaaattttcaacggcaaaattttgcacgtgcaagtcctggaggttgaactgccggacggaaaaacgtcgaaacgcgaggttatcaagcaccccggcgccgtctgtgtgcttgcggtcacaaatgagcataaagtggtgatggtggaacaataccggaaagcggctgaacgcgcgctcattgaaattccggcggggaagctcgaaccgggggaagatccgcttgaagcggcaaaacgagaactggaggaagaaaccggttatgcctgcgcaaaattagaaccggtaaccgctttttatacgtcaccgggctttgcggatgaatatatccgcctttatgccggaaccggccttgaaaagctttccgatccaaaagcgggcgatgatgatgaatttgtcgatattttggaactaggcatggatgaagccaaggaaatgatccggtcggggaaaatatgtgacgccaaaacattggtagccctccagcactggatgcttgaagaggctttaaaatgagtgccggcccgtactttgcagatttgcacatccacatcgggcgcacgaaaacgggaaggcctgttaaaattacgggggcaaaaagcctgacgcttgaaaatatattaaaggcggccaaacagccgaaagggctcgatctcatcggggtgatcgactgccatgtcccggaagtcagggaagagatcaaggcgcttcttacagccggcgaactggtgcagcttgatgaaggcggcttcctctaccagggggaagtcacgctgattcccggtattgaaatggaggtatatgatgaaaactgccgcgggccggtccatctgctcagctattttccggatatggacgcactcggcaagttttccgaatggtatggcgggcgcgtgtccaatccgcatttaagtacacagcgggtctgcgcagaggcccggaaagtgcaggaaaaaacgaaagaactctccgggatgtttattcccgcgcatgtatttaccccctttaagagcctttatggaaaaggcgtggaacggtcgctaacagaagtgcttgacccggatctgatagatgctgtggaattgggattgagttctgataccgccatggctgataaaatcagcgagctgcaccgctatccgttcgtgacaaattcagacgcccactccctcggcaaaatggccagggaataccaaaaattgctgctggaatcgccggggtttacagggctgttaaaagctttgcgcggcgaaggagaaaaccggattgccgccaattacggcttaaacccgaaactcgggaaatattatacaacgacgtgcgccaaatgccggaaccctgtttcaaacggcccgtgcccgtattgcgggtcgcacttgaaaacaaaaggtgtctcggaaagaatagaagagctggcagacgcccattcgcatcctgcccggccgccctacatccaccaggtaccgcttgattttttgccggggctcggcccgaaaacgatgggcaggctgctgagccattttgggacggagatgaatattttgcaccgggtgccggcatccgccctgaaaagcgttgtaaaaccgccgctttcggaactgatcttaaaacagcgttccgggggattggcgtttgaggccggcgggggcggaaaatatggcagggtaaagaatccaaagccggaatagtttcgctccggttttggacttttttcataaacggctctttcctttcatagattaatagcaagtgctaatcttttgaaggaggggacgccgctcatgaagcaaattgccctgcaaaatcctgtcagccgccatatccgggaaaacttctctatttatgcatttgtcatcgcgttgttcctgatgggcgtcatttttggcgccgtcatcgtcaacagcctgtcgatcgcacagaaagaagacttgtttttttatttaaagcaatttttcggacaagtctcaaccggcaaacttgccgcgcctgaggacctgttccgttcaagcttcctgcacaatttgaaatttctcggcctcatctggctgctcgggatttcgatcatcggcctgccgctcattcttgttctcttatttttaaaggggcttgtcgtcgggttttcgatcggttttcttgtcaaccagatgaaatggggcggttttttgctatcatttgtgaccgttctcccacaaaatttgctgatcattcctttgtttatttttacttcggtgatggctgtcatgttttccttgaacctgatccggaaaatttttatgaaacaggctgcccactttgctttttttcaattgtttttaaggtattgcagcgcgcttctcgttgtttttattgcatccctcgcggccgcctgcattgaggcttatctttctccgcagctgatgcaggccgtgatgaagataatccattaaaatcattcttaaataataaatgttgcttttaactgtttataatcatttcattttgactattccccttaatctgctataatatcagagacagcggcaagggggaggaatcatggaagaagctcgtattgatagaattaagaagcaattgcattcggccagctacaaactgacgccgcagcgggaagcaaccgtgcgcgttttgctggaacatgaaacagaccatttaagtgcggaagatgtatacctccttgtgaaagaaaaatcccctgaaatcggcctggccaccgtttatcgcacgttggaactgctgtccgaactgaaagtgttggacaaaatcaattttggcgacggggtataccgttatgacctgaggcaggaaggcgccgcacattttcaccatcatcttgtctgcattgaatgcggcgcggtggacgaaattcaggaagatttattggaaaatgtcgaaaaagttgtggaaagccgctggaattttattataaaagaccatcgcctgacatttcacgggatttgttaccggtgccagcaaaaagaaaagggaaacgaaaacggaaaaaacgaaaaataaccggccttttcgcacgacgaaaaggtttttgttataacaccgcatttttcagccggttttaatttttacataaaaggatgtataaaacggcggaagtctgtcatagcttgtatgtaaagcgatacagaaaggcgggcgggatatgccgtggctgaaacttttgcttcatgcgtttaaagtcttcatattatttttatgctgcacattgctgttctacttttccctgctttgggtgaaccaggaatatgaaagctaccaccgttatgaaaaaccaaaaggcgcggctgtaaaggtgagtgccggggaccataagcctgcctgggcagaacggctgctgctcttttatatggatggggagtaatcggaatggaagatcaaatcaaagatttcatgcattttatgatcgttgaaaaagggcttgctgaaaatacggtcgcgtcctacaaacgcgatctgcacaattatctccgctatctgcaaaaagtggagcttgtttcatcctggaatgaagtgacacggtttcacatcctccattttctgaactttttaaaacagcagggaaagtcctcgaagacgattgccaggcatgtcgcctccatccggtcttttcatcagtttttgttgcgggaaaaatttgcgggccaggatccgactgtccatattgaaaccccgaagcccgagcggacgctcccgaaagtgctgagcgttcaggaagtggaagcgctccttgccgcgccaaaaggggatacgccccttcatatgcgggatgctgcgatgcttgaactgctgtatgcaaccggcatgcgcgtcagtgagatgaccggccttaatcttgatgatttgcatttatcgatgggatttataaaatgtatcggaaaaggggacaaggaaaggatcatcccggtcggccgcacggcgtcggctgcacttgaccggtatttaaaagaagggcgccccaaactggtttcaaaaacaacaagaacggatgccctgtttttgaaccatcacggcgcccgtctctcacggcaaggcttttggaaaatattaaaggcgcttgcgaaaaaagccaatattgaaaaagacatcaccccgcacacactgaggcattcatttgccacccatctgattgaaaacggggcagacttgcgggcggtacaggaaatgctcggccatgccgacatttccacaacacaaatttacacccatgtttcaaaaacgaggttaaaggatgtctatgcgaaattccatccaagggcttaaacccgccgcctgcttttccgggcgcggcggttttggcagggcctcgtttttcgggaacacaggggcaaatcaaaaacagatctttaaggcgcacggcgtaaaaaccgtgcgttttttatttgtccggcagctggcattccgcggatgaaaagaaagggaatttatccagtataaaaatggcgcaactggaaaaaatgattttatgcatatctcccagcgtgtacggaggttttgttttcacgttttacgattttacaagttggagggtcatcatgaagaaaatcattggtttggttacctgcttcatgctcgcttctggcgtccttgtgcctgaagcgttcgcagccgaaaagaaaaatgaactggcgccggaaacgaaatccgccattttaattgaacaggccacgggcgaggtgctgtacagcaagaacagccatgaagaattgccgcctgcttccatgacgaaaatcatgaccatgcttttaattatggaagcgctcgacaaaggcgaaatcaaaatggatgaaaaagtacggacgagcgagtatgcggcatccatgggcggatcgcaaatttttctcgagcccggcgaagaaatgacggtgaaacaaatgctgaaagggattgcgatcggttcggcaaatgacgcggccgttgcgatggcggaaagaattggcggaagcgaggaagcttttgtcgacaaaatgaatgaacgggcaaaagcgctcggtttgaaaaacacccattttgaaaatgtgaccgggctccctgtcaaaggccactacagttcagcttatgacatggccgtcatggcgaagcaattgctgaaacatcacggcattacaaatttcaccggcaaatatgaagattacttaagggaaggctccgataaaaagttctggctcgtcaataccaataaactggtccgccattatccgggcgttgacggcctgaaaaccggttttacaaatgaggcaaaattctgcctgaccgcaacggcaaagaaaaacggcatgcgtgtgatcgccgtcgttttcggggcgccatcaacaaaagtgcggaacgcccaggtttccaaaatgcttgactatgcgttcagccagtacacctcccatccgctttacagaaaaggcgcggtgcttgatcaggtcaaagtgtcaaaaggtagcatgcggcacgtccaggcggtcacgagcgaaccggtatcggtgctgacgaaaaaaggcgtcaaattgtcaaatttgaaaaaaaacgtggagctcaaaaaaaatgtgcaggcccccgtccaaaaaggcgatgaaattggaacactgactgtcagccaggacggaaaggtgcttgcaaaaacaacgcttgttgccgacaaaacagtgaaacgcgcaggctggtggcagctgtttaaacgtgcggcaggcatgtttgtccagaaagattgatgtcgaatccgccaggtttctgtttttttaaagcttcttttgtctcccagaaggaaaaacgggaatcaaggtcgaaatgactcactattaacagcgaaggaggctttaattgtgagtctggctattgacctggaagtgaaaaaagatgtcctgtgcatccggctgcagggggaattggaccaccatacggctgaaagcttgcgtgcaagcgtgacaaaagcaattgaagaaaacggcatccgccatcttgtattaaatctggagcagctttcctttatggatagctccggtttaggcgtgatattgggaagatacaaacagatcaagcagaaaaacggggaaatgatcgtctgcgccatttctccggccgtaaaaaggctgtttgaactgtccggcctctttaaaatcatccgccttgatgaatcggaacaatacgcgctgcacagattgggggttgcctgaatgaaaaataaaatgcaattgcagttttccgcgctcagccggaatgaatctttcgcccgcgtggcggttgccgcttttgttgcccagcttgatccgacgcttgatgaattgaccgaaatcaaaacggtcgtatccgaagcggtaacaaacgcgattattcacggatatgaagaaaacccggatggaatggtttatgtatcggctgccatttgtgacgacggcacggttgaaattaccgtccgcgatgaagggaaaggcatagcggatattgaagaagccaggcaaccgttatttacaacaaagcctgaactggaaagatccggaatgggctttacgatcatggaaaactttatggacgatgtagaaatccagtcgcagccagaatcaggcaccatcattcgtctaaaaaagcatttggccttgaaaaacgccttatgcaattaaggagtcgtgccgatggatgcagaactgaaaaaggcagaaaataaagcccggttaaaagatgaggaagtgaaaaacctgatcaggcgcagccaggaaggcgaccaggaggcacgcgacctgatcgttgaaaaaaatatgcgccttgtctggtcggttgtccagcgctttttaaaccggggatatgaaccggatgacttatttcaaatcggctgtatcgggctgttaaaatcggttgataaatttgatctttcgtatgatgtcaaattttccacctatgcagtccccatgatcatcggggaaatccagcggtttttgcgcgatgacgggacggtaaaggtgagccgttctttgaaagaaacgggcaaccggatccgcaaaatccgcgatgagttaacgaaaaagctggggagatcgccgaccgtgcatgaaattgcatcagaactcgggatgccggtggaagaagtcgtcatggcgcaggaggcaggcaaagccccatcatctatccatgagacggtatatgaaaacgatggcgacccgatcacgcttcttgaccagatttcagaccagaacgaccagaagtggtttgaccagattgccctccaggaagcgatcagagggcttgaggaacgcgaaaggctgattgtgtacctccgctattacaaagaccagacacagtccgaagtggcggaacggcttggcatttcgcaggtgcaggtttcacggcttgaaaagaaaatacttgaagtgatgaaagagcgcatggaattgtaaacgtgcgcttttttcattcccggatgtgccatccaactgaagcgtttttcccgaaaataacacgggatacacggttccccggactccggcaatggaaaaaagcacaggaagcgtgcaaaagtgatcatacgatacatacaacattaaaccggtgcatgaaaatcttccaatatcacatactacaaacacaacgtatgaaagcagggggtgaaggcagtggatgaaacgatttatttgcggctccgccaccgtattcgcgtcaatccgggctttactgtaaaattatcccatattgcccagattcacgcgccgtccggtatacaggaaacccttttggacactcccgtccaaaccatttccaaggctgacggcaacaccgttgtcattgacatgatgaaaattatttccagtatcaagaaaaaggttccggacgctgccatatctcctgtcggcccggcggcaacgattgtggaagtagctgcaaaaaagagatacctgccgattttgttttttatgttgatttggattttgctgtttttaggttccgcgctcgggattatcaattttcatgaagacgtcgacatgcgggctgcccaggaaaaaatttattacctgattacaggcatccgcgacaatacgccgcttatgtttcaaattccctatacgctcggcctcggggcgggtatggtgattttttttaaccatgcgtttaagaaaaaatttaatgaagaaccgagcccgcttgaagttgaaatttttaactatcaacaggacatcgaccattatatcctgttgaatgagaataaggagaacatgaaacattttgaccatccttaagcagatcttcaccgtgttttgcgggctcggcggcgggcttgtggccggctgcgggtatgtggcttttttaacagtgcttggcattgtgccgcggcttgtccagttgtccaggacggaacgattcatccaatcatacgaatgggccgttgtattcggggtgctgtccgggacatggtgggggctcggtggtgaaggcggccggctttctgtaattgttgcggcgcctgttgggttgttttgcggactgtttgtcggcatgcttgctgcggcgctcacggaagtggtcaatgtcatcccgattttttccaaaagaatcggaatggacgggcgtcttgccggcgcattgatggcgatcgtgctcgggaaggtggccggcgccttatttcaatggctttactatgtaaatcattaagaaaggaataaccggcatggtggaaaaacggcgggtgatccttgtcacggacggggatgagtatgcgaaaaaagcaatcgaatgcgttgcgaaaaaaattggcgggcgctgtatttcacagtcatacggaaatccgacccggttgaagggggaacagatcgtggacctgatcctcaaggcggccggagaccctgtttttgccatgttcgatgattcaggggtgatcggcccgggatccggcgaagaggcgctcacttttgtggccgggcatccgcacatcgaggtgctcggcgtgattgcggtcgcatcgaaaacccatcaggccgaatggtcaagggtggatgtatgcattgacaataccggtgaaataacgccgtacggggtggacaaattcggcattccggaaatggatttgaaaaaaatcaacggggacacggtttacagtcttgaccggctggacgtgcccattattgtcggtatcggggatgtgggcaaaatgtcgaaaaaagacgattatcatatcggcgccccgatcacggaaaaagcggtacgcctgatcttggaaaggagtgggttcaagaatggctgaagcaggcaggaaaaggccgatttcatccaatccggcagaagtggaagcattttttaaaaataaagtcgggcttggcatcagctatgatatcggtgtcagaaaaattcgggtccttgatgcagaaatccagctgtactatgtcaacgggctcacggaaacgatttcgattatccaaattatgaaagaactgctgaaattaaataacggcaagttttcttccggaaaagtgcatgaacttgttgaaaattatatcgtccatatgcaggtcgaaaaagtcaacacctatgatgaaatggtggataaagtgctgtccgggctgatcgccatttatgtcgaaggaaagcaagaagcatttattatcgatgttcgcaattatccgggaaggacgccgatggaaccggatacggaaaaagtcgtccggggtgcgcgtgacggttatgtcgaaaacatcgtcctcaacacggccttgacgcggcggaggatccgcgatgagcggctgcgctttgaaatgatgaaagtcggcaaacgctcgaaaacggatgtgtcgattgcttatattgaaggcgtggcagatccgggcgtcatcgaaacggtcagaaaagaactgaaggcgatcgagattgacgggattacgatggcagataaaacagtggaagaatttattttgaagcaaaattataatcctttcccgctgatccgctatacggaacgggcggacgtcgcggccacccatttgctggaggggcatgtgcttgtattggtggatacctccccaagcgtgatgattatgccgacaacggttttccaccatatgcagcacgccgaagaataccgccaggctgcagcagtcggtacgtttatccgctgggtaaggtttttcgggattgccgtttctctttttctcctgcccctttggtatttagtggcggtggaaccgtcgcttttgccggaccaactggattatatcgggccgaataagcagtcgcatgtcccgcttgtccttcagcttcttatcgctgatttaggcattgagtttatgcggattgccgccatccatacgccgacgccgctcgccaccgcaatgggcttgattgcggctgtattagtcggacagattgcggtcgaagccgggctgtttgtttcggaagtcattttgtatgtatccgccgcggcaatcgggacttttgtcacgccaagttatgagctgagcgtggcgaataaacttgtaagaatgattttactgattatcgtggcgctttttaaagtcaaaggttttgtgatcggcatcaccgtttttctgctgttccttgtgtccatccgtccgttgaaaacgccttatttctggccgtttatcccgtttaacccgcaggcatttttccaaatcctgttcagaaagccgattccgggctccaaataccgcccgagcattgtccgcccggtcgaccgcttccgccagccgcctgaagcttgaaactattgcagaaagcctgtttttatgttaaagttagtagaaaattaacgcaaaagttgcaggaaagggagccggatgcctgcccggtttatgccgggaaggcttctctcccgattggcggaatattaggtggggttgaaaacatgaagcataacgggtcggtaaaggtgaatgcaaaggggcatctcgaaatcggcggtgttgacacggtaagtctcgctgcccgttacggaacgcctctttatgtatatgacgttgctttaatacggcaaagggccagagcattcaaggaaacattccggaaactcggcgtcaaatcccagattgcttatgccagcaaggctttttccgccattgccatgatccagcttgcagatgaagaggggctgtctttggatgttgtttcaggcggggagctgtataccgcacttgctgccggttttcctgttgaacgcattcatttccacggcaacaataaaagccgggaagaattggaaatggcgcttgatgccggaatcggctgcatcgttgccgataatttttacgagcttgacatgctggaaaatctgtgtgcaaaaaaaggccgcaaagtttccgcgctcttaagggtcacaccgggcattgaagcccatacacatgattatattttaacgggccaggaagattcaaaattcggttttgacttgcaaaacgggcaggcggaggcagcgctgaagcaggtgctggcatccggccggataaaactgctcggggtgcattgccatatcggatcgcaaatttttgaaacagccggctttgtcctggctgtgcggaaaattatggataaactggacgagtggcatgccaggtacggctatcttccggaagtgcttaatcttggcggcggtttcggcatccgctatacggaagaagaccacccgcttccgcctgcttattatgtggaagaaatcgtcaaagaagtgaagaaacaggccggttcccgccgcctgccgctccccgagatctggatcgaaccgggccgctcgcttgtcggcgaagccgggacgacgctttattcagtcgggtcccgcaaggaagtgccgcatgtcagaaagtatattgcggttgacggggggatgagcgacaatatccgcccggcgctttatgacgcaaaatatgaagcggtgctggccaaccgcccgcttgataagtgtgaagagaccgtatccgttgccgggaaatgctgcgaatcaggggatatgctgatttgggatctgccgctgccgaagacaggcagcaatgatcttttggccgtattctgcaccggcgcttacggctattcgatggcaaataactataaccggatcccgcgcccgccggttgtgtttgtcgaaaacggcaaagatgagcttgtcgtaaagcgggagacgtacgaagacctgatccgcaatgatctccgcctgcgcgtgccgctttcttgacaaatccgcggcggagaagcggatggcgcctgttttccggctttgcttttggaaaatattgtacgtaccttgtttactttctctgaaataggaatatactaataagtaaagcgtttgaattaaattggatgattacgagggattcagtatgttaattcggtataaaaaatctttcgataaaattgccatgggcctgttgtcctttatgccagatgaaaaagatttgaaaaagctgcagcaaacaaagcaattgtacgaaacagaggacaactggcagctttttttatggaaagaggatgatgacattgtcggcctgatcggggtagtgctggatggggacaaagtggaaatccagcatatttccgtcaatccctcttatcgcgaccagggaatcgggaaaagcatggtcaaggctttaaaacaaatgtatgaaggaaaagaagtggttccgaataaatacattgttgacttcttccataagtgtgctgaaaaagaagacccgtcctgaccgggtcttcttttatttcgaatacggcaaaaaggacctgccggcttgatcccggaggccctttttacggttttaccagatatacgcactgccgacaatgatcaacaaaataaaaagcacgacaattaacgcaaatccgctgccccagccaaaaccgtcagccatgataacccctccctcaacagtcattacatggtatactatgtaggcgcgccggaacatgtatggactcctgcccatctgcgcgcttttgattggagatgcatacgtttcaggctatacttattttgacgttttgaaaaaggaacggtgtacaattttatggaatataaagtgaaaatcggtgcgtttgaagggccgctcgatctgcttttgcatctgatccaccagcttgaaatcgacatttacgatattccggtggctgaaattaccgagcagtatttggattacatccatacaatgaaagagcttgaactggacgtcgcgagcgagtatcttgtgatggcggccacacttttggcgatcaaaagcaaaatgcttttgccaaaacaggagccgtccgaaccggatgaagattatacggtggaagaagacccgcgcgaacaacttgtcgagcgcctcctggaatacaaaaaatacaaggaagcagccggcacattcaaacgccttgaagccggccgcaacgaaatcttcaccaagccgccgagcgatttgtcggcgtttgcgccggacgcagatggaaaaaaaatcggcgccaatgtgacgatctatgatatgatcggcgcgttaaataaacttttgcgcagaaaaaaattgcaaaaaccgctgtttaccaaaatcacacggcaggaaatctcgatcgaagaaagaatggctgaaattttaaaacagctggaaacggcgccgggaagcgtccaattttacgacttattctcttttcatgataaagaacaaattgtcgtaacttttttggctgttctggaactgatcaagcgccatcaaattatggcggtacaggaagaaaatttcggcgacattaccgttgtaaggaaagagggggattgatatggaaatcgtccattggagaggcatccttgaaagcctgttgtttgtagcaggggacgaggggctttccctgaaacaaatttcccatgtaatggaaattgaagagtttgaagcagttgaaattttaaagaatttaaaagaacagtacgaaaacgacccggatcgcggcatcacgctcgttgaactggcaggcacgtaccagctggcaaccaaaaaagagcatgcgccgtatttgaaaaaactggtcgaatcgccgaatacgaatacattatcgcaggcggcacttgaaacactggcgatcatctcctataaacaaccgattacaagaattgaaatcgaagaaatccgtggtgtaaaaacagaaaggccgctgcagacgctgatggcaaaagggctgatccaggaagtcggcaggcaggaaggtgccgggcgggcgatcctttacggcacgaccaaagaatttcttgaccatttcgggctgaaaagtttaaaagaactgccgccgtttcccgaacagccggaagatgaattttcgcaggaagaagcagatctgttttttgaaaaattccatgaagaaaaaggcgaaaacggattttcgccgtgaagaaagcttgcccaaactggtgcaggcttttttcgtcttccgcatattccggttatttcttcctgttccgtgcataaacttgtacaaaacgcggtttggaaaagctgaaaaaaggagcttctttatgaaacggtatttcctatatgcggcgcttgcggtgctaattttttcggcccttccgccaagagcggctgctgcgccgtccgtgcaggcaaaaagcgcgatattaatggaccaggatactgggcgggttttgtacgaaaaagatgcatacgaaccgagaagcattgcctcgattacgaaaatcatgacggcgctagtggccattgaatcgggaaaaatgaacaaggaggctgtcgtttcggaccgtgccgtacgtaccgaggggtcatcattgtatttgaaaccgggagacaagtgggaaataaaggatcttgtttacgggctcatgctccggtcgggaaatgacgccgccaatgtgattgccgaaaatgtcgggggcagcatagaaggttttgtttttatgatgaacgaaaaagcgaaagagatcggcatgcatgacacccattttgccaacccgaacggccttgaagacccgaacggccgccattattcgaccgcttatgatatggcgctgttaatgaagtacgcgatgcaaaacaaacagttccggaaaatcaccggcacgaaattttacaaaggctggcggaacaaaaaccggctgctgactgaaaagtaccggtattgtacgggtgggaaaaccggttatacgaaagtggccaagcggacacttgtgacaacggcgacaaaaggaggcgaaaatcttatcgccgttaccctgaacgattcggatgactgggatgaccatattgcgatgtatgagtacggtttccgccagtatgacaggaaacggattgtggaagaggggccggttgccgccgtccgcacgaaatatttgaaacagcatgtttatgtgaaacgggatatcgtctacccgcttaaagccggagaagaagacgccgtaaaagtcgaataccggatcaaaaagcctgaaagttcgtggaaagacccggaaagagtgccggagaccgtcggaagggcgattgtttatttgaacgaaaaagtgatcgcaagcacgcctatttattatcagaaaacgccggttaaagagaaagaaacatggcttgaactgttcgaagagacattttggatccaattggggctgaaaaacaatggttaattatatttggatcggcatggccgtgattgggcttgtttttgcggcggtaaacgggaagatgcaggcggtgaacgaggcgatttttacatccgcgcgcgatgcggtctcgatcagcatcggcctgattagcgtccttgttttctggctcgggatgatgaagattgcggaagtttcaggcctcctttcgaaactttcccgcctgttccggccggtgatcaaaaaattgtttccggatgtgccggacaaccatccggcactcggctacatcctctccaatatgattgccaatatgttcgggctcggaaatgccgccaccccgcttggcattaaagcgatggagcagctgcacgaactgaacggaaggaaaccggaagcaagtcgctcgatgatcacgttccttgccttaaacacatccgggctcacgcttattccggcaacggtgattgccatccgcctgaatgcaggttctgcgcatccgaccgagattgtggcgccaacctgtatcgccacttttgcaacgaccattgccgccatttgcattgaccgctatttttaccaccggcggacgaaacggaggaagtgatgtttttgaaatggatctcactgatttcaatttggctgattccggcaatggtcggatttattctgctttacagcgcatggaaaaaggtgcccgcttacgaaacatttgtggaaggcggcaaggaaggcattaaaattgccttttcgattatcccttttttagtcggcatgcttgtctcaatcacgattttcagggcatcaggcgcgctcgatttttttgtcggatttttaaaaccggccctgcatttgctcggtatcccttccgaagtcgtgccgcttgctttgatccggccggtttccggcaatgccgccctagcccttatggcggatctgatcaaaacatacgggccggactcgctgatcgggagaatggcatccgtcatccagggcagcacggataccaccctttatgtcgtaaccgtttatttcggggcggtcggcatccggaaaatgggggatgccttaaaggtcgggctgctcgccgatctgttcgggattatgatcgcaattttcatggtgctcttgttattctgacgcggcgaaagggaaaatcaacggtttatccgccatttcagggtgcttgtgcgcttcgtcaggctttgcttttcattgccgttatgccataatgcttaaaggatagtttaagcaaaacaaattgaggtgtaacggatggaacgtttgcaaaaagtgatcgcacaggccggtgtcacatcccggagaaaagcggagcagctgatactggaagggaaagtgaaagtgaacggggagatggtcagaacgctggggacaaaagtgtcccaagcggataaaattgaagtggaaggcattccgcttgagcgtgaagaaaaagtatattaccttttttataaaccaagaggggtgatttccgctgtcagcgatgacaaagggagaaaaacggtaagcgactatttccgcgatgcgggcgcaagggtttatccggtcggccggctcgactacgacacgtcgggccttttggtagtcaccaatgacggtgaatttgcaaaccttctgatgcatccgcgttttgaaatcgacaaaacgtatatcgcaaggctttccggcattccatccaggcaggaattaaagcagctggaaaaagggatccggctaaaggacggcatgactgcgcctgccagggcaaaactgttgtccatggacaaacggaaaaagaaagcgatcgtccagcttacgatccatgaaggcagaaacaggcaggtcaggcgcatgttcgaatatctcggctacccggttgaaaaactgcggcgcgaagcatacggcatgctgacactaaaaggattaaacgcgggcgaaaaaagggaactcaccccgcatgaagttaagacgttaagatcccttgccgaaaacggaggcgcctcccgtaaataaaagctcaagtgaagaggcttattttgttcacaaaaacttcaaaaaaaagcgaaaaaggacagaaaaatgttataatgtatgagagttgtgtgacacttttggacagggggaggagcaatgtcacaaacgaaacagaaacgcctcattttccgcgcctcgattctcgctgttctgatattggctgtcggttacacactgtatgcaaatgcgacgaaggagtcgcagggagcgcttgcagcgggggataaggcccctgattttatcctgaaagatttgaatgggaaaacgtaccggttgtccgattataaagggaaaggcgtccttttgaatttttgggggacatggtgcgagccgtgcaagaaagaaatgccttatatgaatgaactctattcgtcctataaaccaaaaggcgtggaaattcttgccgtccacgtaaaaaatacgcgctttcttgtggacgaattcgtgaaacagtacgggcttacgttcccggtgctgattgataaaaacggtgatgtccagcatgcgtatcacatcgacccccttccgacaacctttttgatcgggccggacgggaaagtcaaaaaagtgatcattggaaaccaaaacctctccaaaaaagacattcaggacatgatggatatgatcaaaccataaccgaggagagagacaatgaaggatataaaatgtgagtgcggacatgtgaatcctcccgggaccgttttgtgcgagtcgtgcgggaaagcgctgacagcagaagcggaggcggcagttctccatgatatgcggtatgaagggagcgcgcgcaggtcgcaagtgtataaaaaaacgccggtggataaaatctggaattttttttcgtccgtaaaaaccggcgtctggctgattgtcctgacgttaattgcgtcagccctaggcaccgtgctgccccaggcaggctatatcccttccaatgccgacccgtccgattattacgaggatcagtacggctggttcggcaagctctggtatacgctcggatttgatgacctgtacaattcctggtggtatctgcttttaattgccctgatcggcgtttcgctcgtcatttgcagccttgaccgctttctcccgctgcgccgcgccctttcaaaccagaaagcggcgcgccacgaagggtttctgaagcggcagcgcctttacgtgaaaaaggaaggggccatcgatgatgcgtcatatgcacaggtcaaacgccggcttgaagagaagcattataaaatccgtgaagaaggcgggaacttatttgccgagaaaaaccggttttcccgctgggggccgtacgtcaaccatatcggattgatcatctttctttgcggctgcatgctccgctttattcccggcatgtatgtcgatgaattggtctgggtgagggaaggagaaaaagcggtgctccccggcacaaacgggcagtatgtactgctgaacaagcaattcaagctgcaagtttacagcaagaaagacaatcaaaattttgaaccggcactgaataaggccggcaatgttgcgaaaaattttgagacggatgccgtgctttacaagcaggggaaaaagcgcgttttaggggaagatgctccgcttaaaaaagtgaaatcctaccgcatccaggtcaataagcctttgaaattcgggcattacgccgtatatcaaatggattacaagctggatgaattccaggcgatgtcttttgcttttgagaagaagtcggataaaaaaatatacggcaaacttaaaattgacctgtaccatccaaaggcggaatacccgctcggaaacggctataaagtcaagctgctcggctactatccttcgtttacggggtttgccaaaaacggggagccgcaaacggattcgtatattccaaacaatcctgcttttcttttcagtttaatttcgccggaacatccgaaaggggaaaaaagttttgttgccatccgccagaccgtagaaccgctcggaaaaaatgactacaagttggcttttgctgggcttgaaacacggaatgtttctgctttggccgtaagaaaagacgagacgctctgggtgctggccgttggcggcgcgatctttatgatcggggtcattcaaggcgcgtactggaaccaccgccgtttttggctgaagcgggagaaaggcgccgtgcttttggcagcccatacaaataaaaactggtacgggctgaaaagggagctggaatgggtgctcagcgcatccggcatgccagcgcttgttgacagaaaagaaaggaagaatccgcaacaggcccatacagcttaaacagacaggtgcaatcggatgaggagggggaaaattggaaaatctggtcgaaacaagcagccggttgttgttcgccgcattccttttgtatttaaccggcactttactgttcggcggcgcgatccgcacgccgaaaaagggacaggcaggcggcgccgggccgcaaaaaacgaagtggggaaattttgcgatcttcgcaacggctgcagggtttatttgccaggctggttattttattacaaggtggatagcatccgggcatgcccctgtaagtaatttatttgaattcactactttttttggtatgatgcttgttggagcatttatggtcatttattttctttacaggagtgcggtgctcgggctgtttgctttgccggttgcgcttcttttgattgcctatgcaagcatgttcccgaaagacatcaatccgctcgtgccgtctcttaggagctattggctgcagattcatgtgacaacggcggctgccggggaggccattcttgctgtcagttttgctgccgggctgatttaccttgtgaaaagcaccgatcagcaaaaatcaaactggcagactttttggctggaatttgttatgctttgtttaatttgcatcgccggttttattgttgcaaaatccgctttcggcttgtttcattacaaagtggatttcagctggattgaccgcaacggggcaaaaaacacgggggaaaatgccctcgtctaccatatgccggctgttatcgggccgcatgacggggaaattttaacagccgggagaatgaagccgtggttttacgtgccggcctttatcaatgccgtcaaactgaacacggtcctctggtctgttttcagcggcatgattctttacgcgctggtccggttggcggccagaaagcggatcggcgcgctgttaaaaccgctcaccaaaaatctaaatttagatttaatggatgagatcggctaccgctcggtattgatcggatttccggtgttcacactcggcgcgttaatctttgcgatgatctgggcacaaattgcctggagcaaattttggagttgggacccgaaagaagtgtgggcactggttacgtggctgttttatgccgcctttctccatttgcgcatgtcaagaggctggcaaggtgaaaaatccgcctggctggccgtcattggctttgccattattctgtttaacctgattgcagtaaatcttgtcattgccgggctgcattcgtatgcctgattttgtaagcttttgaatcctgcgcacccccgggagggcccacccgggaatgcggtggcttgcatggacccgcaaggattttaccggcggatgtatcttgcccgggcagggtgctgatattgactgaggaggaatagccatggatgaggatgtaaaaattttagtggttgatgatgaagaaaggatccggcgcctgttacgaatgtatttggaaagggaaaattacatgattgatgaagcggaagacggcgataccgctttgaaaatggcgcttgaaaaagactacagctgcattttgctcgatattatgatgccgggaaaagacggcattgaagtgtgccaggaattgcacgaaaagaaaatgacgcccgtgatcatgctgacggccaaaggcgaagaagccaacagggtggaaggatttgaagtcggcgcggatgattatattgtaaaaccgttcagcccgcgcgaagtggtgctgcgggtgaaagccctgctccgccggtcgctgcaaacgggtttcttaagcgcggatacgaaagcaaaagacattgtcgttttcccacatattaccatcgacaatgatgcccaccgcgtcacagcggacggaaaagaagtcaatctgaccccgaaagagtatgagcttctttattttctcgctaaatctccggataaagtgtttgaccgcgaacagcttttaaaagaagtatggcattatgaatttttcggcgatctccgtacggtggatacgcatgtcaaacgcttgcgggaaaaattgaataaagtgagcgaaaacgcggctaaaatgatcgttaccgtctggggcgtcgggtataaatttgaggttgcgccggaatgagaatttggcggacggttgtcgggaaactgtggatgaccattctgctgatggttgcctgcgtcttgctcatcctgacggtactgttgctcaagttttttgaagaataccatatcaagcagattgagcaggatttgtccaatacggcgcaaaaaatctcgagagttatggaggagcacccaagcggaaagatcgggaaagaaattgccctcggcgttctggaccaaaacgagaaagtgatgatcgtttaccgcaaaaatgatatcttttatccgtccggttccaaatcatataaagggatcccgtacgcgtcgattttaagggataagcagttgtccaaagtgtttagcgaaaagaagaaagtgatcaaagagttaaccccttccggcgggtcttcccgcaataagtaccatcatgtgattgtgacggccgtcccgcttcatgtgaagggggaagaaccgggcgcggtatttgtttaccagtcattggaagtgctccaggaaatgacgcggcaaacgacaaaaatcattttgctcggtgcaggcattgccattattttaacgaccggctttgccttcttcctttcaaaaaggattggcgggccgttgcataaaatgcgggaagcggcttttgaagtggcaaaagggcgctttgacaaaaaggtgccgattttaacccgtgatgaaatcggggaactggcgaccgcttttaatacgatggggcggcagcttaaatttaatatggacgccctgaagcaggaaaaagagcagctgcggaatattttaagcagcatggccgatggtgttttaacctttaaccgggacggcgccatcttaatcatgaacccgccggccgagatgttccttcaaaattggtaccataaccaggctgcaaaagacgccccccttcctgaagggctgtccgcattgcttgcaaaggtggtcgaaacggagaaagaacagacggatgaaattgaaatcaacggccggtactatgtcatgattgcaagcccgctttataatttgtcccgtatccgcggcgttgtcaccattatccgcgatatgacggaagaacggaagctggacaagctgcgcgatgattttatcgcaaatgtttcgcacgaattgcggacgccggttgccatgctgcagggatacagcgaagcaatcattgatgatattgcggcaagtgaagaagaaaagaaagaatttgccaaaatcatttacgatgaaacgctcaggatcggccggcttgtcaatgagctgctcgatctggcaagaatggaagcagggcatttttcattcagaatggagccggtctcattcaaaagttttatcgaaagagtgacacataaatttaacggcatcgcgaaagaaaaaggaatcggcctcgtttgcgagactacttcggacaatgatctcacccttgaaatcgatgccgacaggattgaacaggtgctgacgaatttaattgataacgccctccggcatacttccccggacggttacgtcaaagtaaaagaggaagaaacctccggcggcgtatatgtacacgtcgaagacaacggatccggcattccgggcgaggatttgccgtttgtatttgaacgcttttacaaagcggataaagcaaggacacgcggcaaatcgggaacagggctgggccttgcgattgccaaaaacattgtcgaagggcatggcggccggatctttgtcaaaagcaaactaggggaagggaccaccttttcattttttcttccaaaaaagggctgacccggcgccgggtctgcctttttttgtatattttcccgtttttttgcgcatcttagaagatggctttgcttgaatcggaattgaaaaaacgaaaatggggtggatcaattgccagcatacatcaaaatatgccttttcgtttcattggcagctgcatgcctgggggttgcctgttcggcaaatggcgtgtccgcgtccgggccggatatccatgaagcgacaaaagactggatttttccggcgacagggacgatctccgacacatttaacacaaggtacggcacacataaagggcttgatattgccggaagataccgtgcaaaagtattcagcgcccaagaaggcaccgttatccgttcctatttgtccgcatcctacggacatgttgtttttgtccgccatccgtccggatatgagacggtttacgcccatcttgccggaagggcagtcagagcggggcagcatgttgaaaaaggaaaggtggtcggctatatgggttcgaccggccattcaaccggtatccatcttcattttgaagtgcatcgcggatcctggacgccggataaaaaaaacgcgattgacccgtttttgatcttcgggacaggcgcgctgggccagacggtttccgccaatgcccatgacccttatggggtttttgatgcttccgccatccctcagcccgtagcttacactgtgaaaaaaggcgatacgctctggaacattgccctgcatttccatacgagcgtgggcaggctgaaaagctggaacaaattgcggtcagaccggattatggccggccaggtgctgaaaataaaaaatgaatgaaagtggtgcggaatgcttcacaaaatggcagccggcatgtataataagcttgtaataaaaatttcatacgatttatcttcggggctgggtgagattcccgaccggcggtgataaggcagttgcctttcagtccgcgagccggctttccggcaggatttggtgaaattccaaaaccgacagtatagtctggatgggagaagataaaggttgccagtgtttaatgacgcgttaaacgcttacttggactcgcctattacaaagcccccggcattttgtcaggggcttttcattttggtccgcggcacctttcttcctttgatggtaaatcggtcacaaggggagaggaagttaaaatgaagaaatgggatgtaaagcaattcgttgcagtcgcgttgctcagtgctctggcttttatgctgacgtttattaaatttccggttccgccttttccatcgtttttaacagtggacttcagcgacattccggtattggtggcagcccttctttacgggccgatggcttctgttgtagcggaactggtcaaaaatatcctgaactatttatcgctcggcagtgaagcaggggtaccgatcgggaatgtggcgaacttttttgcagggatgctgttcgtcctgccgacatatctcatttacaaacggatgcggacaaaaaaaggcatgactttcggcctgatcaccggcacggtatccatgtcggtatgtatgagcattttgaattatttcatcattttgccggcttacttgtacttcatgaacttttcggtcggcaatgtaaaagcgtatattgtagcgggcgtgttgccttttaatcttgtgaaaggtctcatcgtgacggctttgtttatgctcatgtttacaaaaatgaaaaactggattgacaaagcctccgccattggggggaaaagaatatgaaaaaaagcaggccatcccagcctgctttttttcattcgtattttagcggatcgccgtcaaaaggcttgtcggaaactttaatcgattctgtcgggcatccttcaaaggcatccatcaggtcatcttccaatatttccgggacttctgcaatgcctttattatcatccaaaatgacgaaagagagcccttcatcatcatagtcgaaaatatcaggagcgctggcggaacaagcgccgcaagcgatgcatgtatctttgtctacgattgtaaactttgccattttgattcctcctcgctgttcaatcacggcagaaaagaaaaacgggcagcctcgtaatgcgcaaggaggcatgccgatgtttctccttcattttaaaactctttttttcttatttcaatagcgggcttcgcggggttcgtgaaacctgccgaatcaatgaaaaaaatggtaaacaaatctccggtttccatgttaaaatagaaccaacccccgatttttccttgcactttccccttttttcagcaaaagaacaggagaggattcagatgccttttttacaggctgtattgctggattgcttcagcaacctgaatggagaacgcaccccttatgctgtttttcatcttttaaacgggaaaaaatcagcacagaccatccaggattcccattttttcaagatcggcaggctctttcagacgtttccatttatttcccgcgaagatttcacacgcgaagtagaagcccttttaatagccggattactgcaaaaaagcggcccggatgcctgcgtggtcacaaaaaaaggcgctgcccggcttttggcaaccggcaggatggaagaaaggtttccttacctggacggcttgaaataccaggattcggcaaatctgttttggaaaaggctgaacctcatcacccaggccgtatccaacttagtgtatggaaataaagtatattatccggttcaaagggacccggctctgcaggcttgggcaaaaaactggctgaaacagcatgcaaaaagccggactgctttagcagagcatctgtatcgtgaattttacagcctgttttccggcagcccgccggaaaagcctgaaatttttgtcctccggttgacgggtgcgggccggatcggatatacaatcacgcaggctgcctccgccctgcaccttgatcctgtggagtactggtatcgatatttgcatttgcttcattttatggtccggcgcatcctgggagatcctgaaacattctggtatttataccaaatgcttcatgatgtgcaaaaggccctgccgctgacccggtctgcctcggtgacattcggcttcttgaagcaagggaaaacgattgcggaaatcagcacgctgagagggttaaagcaaagcacaattgaagaccatctgattgaaatcgcgttaacggtcccggattttccgctgaaccggtatgtgccaaaggatgaagaacaaaagatcatccgggcagccgctgatttaaatacgaagaaattaaaaccgattaaagaaaaagtaggggatgtcccgtatttccatattcgacttgtattggcggaaaggatgggctgcagtggatcttttaagctttttgaaaagtaagttcgggttcagcgcattccgggcggggcaggaaaaagtcatccgttcgctgctggacggcaaagatacactggcgatgcttgcgaccggtaccggaaaatctttatgctatcagttgcctgcctatttgctggacggatcctgcatcatcgtttccccgcttttatcgctcatgcaggatcagacagagcagatgaaaatgcgcggcgaaaaaagtgtggtggcgttaaattcgtttttaaccggtccggagcgggaagccgcccttgcacatctgggtgctttcaaatttatctttgtttcgccggagatgctgcacaaccgccatgtcctcggaaaattaaaacaaatccggactgcgctgtttgcggtcgatgaagcgcattgtatttcccaatggggccatgatttcaggccggaatacttaaaccttggcgaaatccggaaacaattgggtacaccgcttacccttgccctgaccgccacagcaacagaacaggtgagggacgatatttgcaagtatctcggcttaaaagacccaaaccggtttatttattctgtcaacaggcccaatatcgccattaaaatagaccggattccttcataccgcgaaaaagaggaaaaactagttgcctatgcgaaaaacttgcagaagcccggtatcatctatttttcaagcaaaaaggcggctgaggaaatggcggcgcggttaaggcaggagggaatcgccgaagcagccgcctatcacagcggcattgaccaggagcaaagaattttgatccagcagcagtttatttacggacagatcgggatcatttgtgcgacaagcgcgtttggcatgggggtggacaaagcagatatccgctttgtcatccattttcacctgccgttgcagatggaagcctatctgcaggaaatcggcagagccgggcgggacgggctcccgagcattgccgtccttttgtatacggaaggggatgaacggctcccgcttcagctgatcgaggctgagcttccgactgatgcacaattggccgcttttagcagatggaaaggggatctgaaggaagccggggcgctgctcggatgcacggaaccgcaactccggttcctagcgcaccacagagcgcttaacctgccggaagaagcatggatccgggaggttgcagccatccgggacgagcggatggcgtacaagcgaaggaagttaaaggaaatggtgcagatggtccggtcttcgtcatgccgccgctcggaaattttacggtatttcggtgaaccgcccgctgcaggcaatgaagcgtgctgtgacatttgcggccttgaaacagccttatatgaaagcaatcaaaaaagcgggggcaccctggaaaccgttcctgcctgggaattgcttttgcaggatctattcagaaaaggggaacagaaatggcgcgaagaaaacaggcggatttgatcaaggaactcacagaccgggaacttacttttcacttaattttgacgcagctgattctcctgtttgctgccgctttgctcggatttctgttatttccggatggcgaagcattttttcagcactttcacttgtcatttgcgaaatgtacatatggtttattaaacggagccgctgtcgttgcggcggatactttgctcatgaaatggctcccgaaagcgtattatgatgacgggggcgtaaatgagcggatttttaaatcccgttcaatttcggacattattgctttaacggcgctgatcgcggtggcggaagagctcttgttccggggcgtcatccagacgcattttggattgccggcagcaagccttatttttgcactcatgcatatccggtattttggccactggtatttgattgcgaatgtgctgcttttaagtttttggattggtgccgtttatgcgctttctcatgaaaatcttccggcagtcatcatcatgcattttacaatcgattgtttactgggtatccgcatcaaaaaacagaggatttagtccggatgtggggaaggggaagccatgtcagacgaaaaatatatcattgaaatggaaaaacggcggcaaaagcttgaaccggccggcaaagcaaaggaaaaaacggagaaacaaacggcggcggccgtttcgcgggcggaaaagcggaaaagtaccaaaaaggaatcccgttccaggttgccgcttgtgaacctgttggctgtcatttttattttagtgccgattgccgtttacatctgttatacttttttgtttttcagatagacgcccatgccgcgataaatggcgccgcaagaagggaaaaatctgcaggcgcaaattttcaggacagggcaaactgcttgcttgtcatggatcagcctcctgcagcatatagtggagtgagggagggatcaatatggagccgtccatcaccgggctaaaagggacagatgcggcgacaaagcagatgttacagggtgtcgtcaaacgcaaaaaaaaatttgaccggcttcggatgcggcatcttgtttttctttggacaagcatgctctacacatgcgcatgggcttactatgtttaccgttcttttgaaaatgccgattccatgttctccgttttctccggcatttcagaaagcccgtttcagctgtttttcctgctcttggccgccgcgttttggggcatgagtaaaatcttgtttgacaagcgggaaaaggctgaaaaagaattccatgcgctccgctgtgaaattattgataaaagcaaggatttatggaaaggggaaagctggaaggaccgccaccttgtattcgaaatgatgcaaaaagagtttgatattaatttataccacgagaataagtagccattcaccggaaacaggcacggggactcaaagccgccgaaaaaaagaagatgccctggcatcttctaaaaaatttttttcctgcctctttcttccattaaaatttgcgcggcttcgcggaaccgctgcgagtggataatctcccgctcccttaaaaagcggagcccgtcatttaggtcggggtcgtcacttaaattgatgatccattgatacgtagcccgcgctttttcttcggcggcaatgtcttcatagatgtcggcaatcgggtccccttttgcctggatataggtggctgtccatggggcccctgcggcattatggtaatgcagtgccttatcatggtccacataatgcgcgtcaaggccggcagcaatcaattggtccggcgtggcatcttttgttaattttaagaccatcgtcgcaatcatctcaagatgggccagttcttccgtaccgatatcatttaaaagccccatcactttatccgggatggtgtagcgctggttcaaataccggagcgctgccgcaagctctccgtccgctccgccgtattgttcgattaaaagtttcgcaagtctcgggttacagcttgagacccggacgggatattgcaattttttctcatagatccacatgaacgttttccccctttatttgcttatacctgccatggccacggcggctctttccactggaaaggcgttggcgaatagctgtgcccgaagtttgtcagcggtccgaactgtttttcaaatgctcttttgacttttttcctggcatggacaaaagtgttatactgttcgatcgctgcctgatcatcgggatgggtatccaaataaaggttcagctccacaattgcaaaatcaagggcctgcagttcttcaagccttgtgtaatactcttttggcagctgcttcaatcggtttcctcctttgcccgttcataagggctgtaataagggtcataaagcggcctccaaagcgtcccgcgcctcaacgcttcctgcggtgcaaattgaggaaggttcgggggctggaaccctaaatacaaatttggcggggtggaataaactttttcggttatcggcggacaggggtcaaatggcccgataaagggatgatacgttttataatggcttttcatctcagtcctcctgacatttaaaagtctttttcattttatgcgcggttctctcccgctatgtcaaaaacaatgccggaatgctttctatctggcgtgattaagatataatacgaatagggattgcagaaaatttcgtttgtgccggcaaggacccggcggaacaggagctctcgtgtatgtttgcatttttatggattgcctctttgcttggcatagtcttattgatgtatatgcgctatgaagcatcgttaaaccggctcgtccggcaccggtttttgcttgatgaatatccggccggagaggagccgtgcacttttttctttatttccgatatccaccggcgcaaaatcgatcccggactggtggaagaggcaacagggaaagcacggtttgcagtaatcgggggagatttgctggaaaagggggttccgctttccagaacagaagaaaatttgcggttgctgaaaagaattggcccggtattttttgtgtggggaaataatgattatgaagcggacggcaaagcgctcgcggccgtttttgccagaaccggcgtccgcacgctgcgcaacgcggcggattttgtatgcgtaaacggaaaaaaacggattgcgctgatcggcgtggatgatttgacgacggaaaatgaaaatcttgatgaagcgcttcaatcggtgcaaccggacgatctccggattttaatcagccataacccgaaaatgatccaccagcttcatgaatgggacgatatcgatgtgatgctgagcggccatacgcacggcgggcagatccgcattctcggtctcagccgctacaggcgcggcggggtgagaaaagcgcgcaatgttatccatctcataagcaacggttacggcacgacgcttgttccgctcaggctttgcgcaaaaccggaagcccatttgattacgatcgaaagcaacaggcggccatcatgaaccatctttcccctcccgcatacgataaggtaagatccgtatgcagggggcggaaatcaatgaagctggaacggatttcatccaataaaattaaatactccattacgtttgaagagttatcggaacgcggtattatggaaaacgatctcgactcgcccatttggaatcatttatttgaagaaatgctggagttggcggatcaggcttaccatgtcggcgaaagcgacatgctgaccattgaaatctattcctttaatgtccaggaattggtgtttattctgacagtaggggaagcggacgacgcggatccgggcgaatgggcggacccggaaaacttggaacaggaagaagcctattggtttccatcgattgaggaaatgattgcgcttgcgggctttttaaaccagatcggccggatttccgcgtgcagcctttatatattcgaagaccagtattatttgctgcaaaaaccttggacccaaaatgcgccgcttattcttgaatacggcgagcgcgcgcaaatctccccgtttatggtccgggaatacgggatcgcggtgtttgagcaaaatgcacttgcggaacttctgaagcatttcccgtaaccgtccggcatgttttttcaggttttcatctgctggggaaagttgtatactaaatttgatagcagatatttctttcgtatctaggaggtttgcgataatggcagccgaaaagggcgcagatcatcaaacaatggaagcaagtcgagatgtgctgaaatcgacacagacaattattcacgaagctcttgaaaagcttggataccctgaagaagtatacgaacttttaaaagagccggtccgtatgttaacggttaaaattcccgtcagaatggatgatggtacggttaagatttttacggggtaccgcgcgcagcacaatgatgctgtcggcccgacaaaaggaggcgtccggtttcatccggatgtgacggaaaatgaagtgaaagccttgtctatatggatgacgctaaaatgcggcattgtgaatctgccgtatgggggaggaaaaggcggcatcatctgcgatccgcggaaaatgtctttccgcgagctcgagaatttgagccgcggctatgtccgggcgatcagccagattgtcggtccgacgaaagacattccggcaccggacgtgtttacaaattcgcaaataatggcctggatgatggatgaatacagccggatcgacgaatttaattcgccgggctttatcacaggaaaaccgcttgtgcttggcggttcgcacggccgcgaatccgctacggccaaaggggtaaccatctgcattcgcgaggcggccagaaaaaaagggattgatttaaaaggcgccagggttgtcattcaggggttcggcaatgccggaagtttccttgcaaaatttatgcatgatgcgggcgcaaaagtgattggcatatccgacgcatacggcgcgctgcatgatccggaaggccttgatattgactatttgctcgaccgccgcgacagtttcgggacggttacaaccctgtttaaaaatacgattacgaacaaggaattgcttgaactggattgcgatattctcgttccggccgccattgaaaaccaaattacagaagaaaacgcccataatatccaggcgaaaattgtggtggaagcagcaaacggcccgacaacgcttgaagcaaccgaaattttaaccaaccgcggcattctgctcgttccggatgtacttgcatctgccgggggcgtcacggtttcgtattttgaatgggtacagaataaccaggggtattactggacggaggaagaagtggaagaaaaacttgaaaaagtgcttgtccagtcgtttaatacggtctacaatacttcccgctcacgccgggtgaacatgcggcttgccgcttatatgatcggtgtaagaagagtggcggaagcttcgcggttcagaggctggatttagagtttccgaaagccggctccagccgggcggcaaacggggctttacaggttttagaagaagaaggctgaaatctcctgtcgtgttacggtgggagatttttaaataaatggatgaaaacgaaaaggcagatacgaaaaaaggatgagtggacaaacatgcgaaaagaagattgtatcattattggcggcggcccttgcggattggctgctgcaatcagcctgcaggaaatcgggaaacatccgcttatactggaaaaaggaaatgtcgtcaatgcgatttaccgttatccgacgcaccagacttttttcagttcaagcgaccggcttgcaatcggcgatgtgccgtttattaccgaaaatttaaagccgaagcgcaatcaggcgcttacatactaccgcgaagtggcgaaactgaaagcccttcgcatccgccggtttgaagaagcgctccgtgtcgaaaagaaacgcggaacctttatcgttacgacgacaaaaggccaatatgagacgccttatgtggtcatcgcaaccggctattacgacaatccgaacaggctggatgtcccgggggaagatttaaacaaagtgtaccattattttaaagaagcccatccgttttttgacaccgatgtttgcgtgatcggcggaaaaaactctgctgtggacgccgccattgaacttcacaaggcaggcgcccgcgtgaccgtgctgtaccgcggcgatcattattccgaaagcattaaaccgtggatattgccggaatttgattcgcttatccgccacgggaaagtgaaaatggaatttcaggcgcacgtgaaagaaattaaagaacagagcgttgtatacgaagcgggcggagaagtgaaagagatccggaatgattttgtatttgcgatggtcggttatcatccggatcattcgtttttgcggaaaatgggagtgggcgtcgatccggaaacaggtcgcccacattacaaagaagagacaatggaaacgaatgttgaaggaatttttattgcgggcgtgcttgctgccggaaacaatgccaatgagatttttattgaaaacgggcgtttccatggcggtgtgattgccgctgagatcaaaaaacgggaggctcacttgcaaaaaggaaattaaaggttttttcagggggcagtatttcttttccggctttttcatgttacgatgaaaacaaaactctgcacggatcatttgatttttacaaaaagcgaggtttcgatatgcttgttcttttgtcagccggcatcgcccccggacttgccctgctatgctatttttatttgcgggaccagtttgagcctgagccgatacttgttgttgcaaaagcgtttttatacggtgcgcttatcacgctgccggtcatgtttttgcagtttatcctcgaacgggagcatctgttttcgggcagcatctggcatgctttcctccattccgctttgccggaggaactttgcaagtggctgtgtttggccgctattgtgttttttaaccgggaatttgatgaaccttttgacggcattgtgtacggcgtcagcgtctcgcttggatttgccacgtttgaaaatattttatcgcttttttcgggcggcgttgacctggctttcgggcgtgcgcttcttcctgtatcaagccatgccgttttcggtgtcatgatgggcttttatatgggaaaatccagattctccccgcgcaaaaaaagctggttccttttttctttcattgtgccggtgatcttgcatgggttttacgactggattatgctcacccagcaaaaatggctgtattttatggtgccgtttatgctcgggctttggtggctcggcctgaaaaaagcaaagcaggcgcacagcctttctgccgaacattttgcgcaggatgcggcaggaacacaacaattatgataatgggcaaaacaaccggataaatcgccggttgtttttttatgtcttgtataaaattgccgccttctccagaaactacggataatgcttaaagtttttggggggtgcggtatgattgaaaaaaatcgcttaaaatacatgttgctgctttgtgctgtattggccttgttttcttttggcacaagcgagacggcccgggcgttttcgaatcaggtgattcaaaaaggggcggtcggggatgatgtgattgaactgcaggcgaggctgcagtacatcggttactataaaggaacgattgacggggtgtttggttacagcacttactgggctttaagaaatttccagaaggcatacggaatgcctgttgacggcctcgccggaccgggcgtcaaaaagaaacttgtcaaagcgtcaaaatacgatgcggcatacgtaaagtccatggttgcaagcgggaaaaaatttacgtattacggcggcacaaaaaagcaggcaccgaaaacggcagccaaaaaaccggcccaaaccgcaaccaatgtgccgaacggcttttcacaaaacgacatccgccttttgcaacgagcggtttacggggaggcgcgcggcgaaccgtatgaagggcaggtggccgtggcggctgttatcttaaaccgtattgagagcccgtcttttccaaacaccattcccggggtgattttcgaaccgggtgcgtttacctgtgtttccgacgggcagatctggcttgcgccgaatgatacggcaaaaaaagccgtcctcgatgcgatcaacggctgggatccgtccggaaatgcgctgtattattttaatccggcgaccgcaacaagcaagtggatctggtcaaggccgcaaatcaaacgaatcggtaaacatattttttgcaaataagagggggaaatgaatatgctgaaacgggcaatgattgttgtgcttgccctcgggctttgcgggactgctgcctgggcatataaagagcaccgtgaaaaagaggcggtcttgttaaatgcagaaagcacgtatcaaagggcttttcatgaccttgcatacaaagtggaccttttgcatgatgaaattggaaacaccctcgccatgaattcgcgcaagtccctttcaccggcactggctgaagtgtggcgcctgacatcggaagcgcatgcggatgttggccagcttccgttatcgcttctgccttttcataaaacggaagaatttctgactgatatcgggaatttcagctaccggacggcggtgcgcgatttggacaaagaacctctatccgataaagagtatgcttcactgaaaaaactgtacggccagagcgcggatatccaggaccagatccggggcgtgcaaaataacgttttacagcacaatctccgctggatggacgtggaacgcgcccttgcccaaggaaaagaaacgaaggataacacgatcatcgacggctttaagacggtcgaaaggacggtcaaaggctatgacaatgctgatttgaacagcccgtcttttacgagtttccaaaaccgagatgaccattatgagcacctggaaggaaaaatgatcagcaaaaaacaggcggtcgccactgtaaaacaatacgccggagtcaaaacggcccgaaaggcggaagccaaaccgaatcaaaaaggcgcccgtttttctttttacaccgtccgtttaaaagacaaaaacggctatgaaacaaccgcggatgttacgcggaaagggggatacccggtctggtttttcaacaagcgcccggtggggaagcaaaaaatcagtttaaacggggcccaaaagaaagcggcggattttttaaaccggcaccattttgagaaaatggatatgtttgaaagcatgcaatatgacaacgtcggtgttttttctttcgctgcgaaacaggggaatgtccgcatttatccggaaacggtcaaattaaaagtggcgcttgacaacggccaggtgatcgggtttgtggcggatgattttctgaaaagccatcaaaaaagggatattccaaagcccgccatcagtgaaaaagaagcaagagcccgtgtgaacccgaagcttgacattatggaaagccgccttgcgattatgaccggcgacatgaaccgagaagtgctctgttatgaatttctcggcgtgttgcatgatgaaacataccggatttacatcaacgcggaaaacggcaacgaagaaaaagtggaaaagctgaaaaatacggaaagagcatacggcaagtccatatgagcattgcccggcatacagccgggccttttggcaaaaaaaagatatgaagcgcgaaaaaagaatacaaaaccgccccgcctgtgtcataataagattggaatctataaaaggggattggaaagatgttaaaagtcgggctggaactcacactggaagacaaagacacaggtaaaagatacagatgtaaaattgcggatataaaagaggataaaatttatattgattacccgatcgacctggaaacaaaccggaccgtatttttgctgattggccaggggctgctcgttgatttcgtttcggacggccagattccttaccggttttcatcaaaagtcaccggcagggaactcggcaatatcccgatgcttattttatccgtaccggagccggaagatgtgcgcaagatccagcggcggcaatatgtcagggtagatgtcgcgctcgatattgccctcacctttccggaatccaatttgaaaacaacggcagttacaaaagacatcagttcgggcggctgcgccgtctacttgcctcgcaatatccgcccgggggagcatgaaacaggaaaagcgcttcttgtcctgccgctaaaagaaggctaccagtacttgcagctgcttttttccgtcgtcaggctgtttgaaaccggtggaaaaacgggggcctcgctccagtttaaagatacaagcgcaaaagagaggcagtatatcctgcgtttttgcttcgagcagcagcttttgctccgtaaaaagggcctttccggataaaacttgcatttcatggataggaggattcaccattttatggtacactataaagagggtgtatccttttatctgctcaaaaaacgggtatatgcaacaagagagaatagggtgaaatcgttgtatgaaaaaaatcaatattgccatcgacggtcctgctgctgcagggaaaagcacggcggcgaaaaaagttgccgagcagttgcaatatatttacattgatacaggcgcaatgtaccggtcgcttacttataaagcgctgcagtacggaacggaccttgaagacggcaatgcgcttgccaaacttttgtacaagacaaatatccgcctggagccgggggaaaacggccagattgtttttgtcgacggtgaagacgtaaccggcaagatcagggaaagggaagtgacgagagcagtttcagctgtttcaaagcatgccgttgtccgtgaagaaatggtcaagcggcagcggatgctcgcccgtggcggcggcgttgtcatggacggccgggatatcgggacaaaagtattgccggatgccgaattgaagatttttttgctggccagcgccgatgagcgcgcaaagcggcgccatgccgaaaatgttgcaaaagggatcccttcagacctcagccgtttaaaacaggagattgaggaaagggacaggctggattccgaacgggaagtttcaccgctctctaaagcggcggacgccgtagaactggacacgacaagcatggacattgatgaagttgccggaaagattcttgcgatggcaaaagaaaaaatcacacagcagcaatcggcttctttacttgacaaaaagtaaaagatgttagaaatttgataggaaagcgtttctttttgaattatacgaattaatttgaaaagaacgggtatattcaatggtatttgaagcgccggataaggaggaagtacatatgccagacgaaatgaatgaaatagaagtacggtccctttctgtaggggataaagtgaaagcatcggttgtcaaagtggaggaaaagcaagtgctcgtttccattgaaggcagcaaagtggacgggattattccgatcagcgagctttccaatctccatattgaaaccgcatcagatgccgtgaaagaaggggacgagctgaatctcgtcgttacgaaagtggaagaagacgccgtcattctttccaaacggaaatatgatgctgaaaaagcatgggatgagctgaaggaaaaatttgaaaaccaggaaatcatcgaagcggaagttaatgaagtggtaaaaggcggccttgttgtcgatttgggtgtccgcggctttgtccctgcatcgcttgtcgaggaccactttgttgaagacttctccgactataaagggaaaacattgccctttttgatcgttgaactggacgaggacaaaaaccggttgattttatcacaccgggctgtggtggaaaaagaaaaagaagaaaaacgccaggatattcttgaccatctcgaagcaggccaggtgctggaagggaccgtgcaaaggctgacgaatttcggcgcttttgtcgatatcggcggaattgacggccttgtccatatttcccagcttgcgcatgaacgggtggaaacgccgtccgatgtcgtcaaagaaggggaaaaggtcaaagtgaaagtgttgtcggtggaccgggacaacgggcggatttccttgtccatcaaggatacacttccgggcccctgggaaggcattgaacagaaagcacagaaggggactgtccttaccgggacggtaaaacgcttggtttcgttcggggcatttgtggaagtattcccgggcgttgaagggcttgtccatatttcacaaatttcccataagcatgtgtccacccctcatgaagtgttaagggaagggcaggaagtgcaggtgaaagtgctcgatgtcaatgaacaggcgcaccgcttgtccttaagcatgaaagaactggaacaggctgatacagcagcttctgattatgaccttccagaagaaaataccgggttccagcttggggatatgatcggggaccagttgaagaaatttaagcagtaaaaaagcccgtccggttggaatgaaaaagctgagaggcgcccgtgtagccggtgccgctcagcttttttgcgctttgtcttgcctattaaccgctcattttactgccgtttgcgtgcttcatcagcgctttcaaggcgggttgcccctccgtagtggagcgcctggtcacggtcgctttccacacgcccgctttggcgtagttttttctcctggcggtcttttcccattgcccattcacccccgtttgtagtatgcctgaaaaaagcgaaaaacttgcggttaacccggtgtaatctttcccataatggagataaaggagggtgcaccgtggaaggagcattttttttgggggtgatgtgggcggtatggatttgggcgacatttttgctggacaggcatcaccgtttacggtttccggcagcactggttgctttgctgctcgtgatcagctttccgcatcaagcggcggtgggccgtctcgatatcagctgggcgctcatcgtcatcatggctgccggttatgggtacttcggcaaattttcgaaatgggcgcttttggcccggctcgccggcgtctttatcgtgatgacaggctatgcaggcctgttgttatttgaactgtacgatccggtctggatgtttgcctggcgtaccatttgctacagcctgtttttgtttatccttgtccatttgctttttcgttcaaaaatggatgccgttgccgccgcactgaccggtacggcacaaggggaaattctgtatgcactggtgcttgcaaaatgggattaccatgttacggcaggctctgcggcatatctcgatatcgccgggctttttctcctctatgcgtacggctggcatatcatggatgccgccttgaatctcatatcagaaaaagcagcaaaaaaggaaaggccgggatgatttgtgggatattgcctgaacaagaaaatattgataaactactaaagttgatttgttttgcgaaaacggaacagaaagggtgaatcgtatggcaaaaccggttgtggcaattgtcggacgcccgaatgtaggcaaatctaccatttttaaccgaattgtaggagagcgggtttctattgtggaagatgttccgggagtgacaagagaccgtatatacagtccggcagaatggctgacacacgaatttaacgtgattgatacaggcggcattgatatcggggatgaaccgtttctcgagcagatccggcagcaggctgaaatcgccatccaggaagcggatgtgatcatttttattacaagcggtagagaaggcgtgacttctgcggatgaaatggtcgccaaaatattgtaccggtcaaaaaagccggtcgttctggcagtgaacaaggttgacaatcccgagatgcgcacccagatttatgatttttacgccctcggttttggcgatcctttcccgatatccggcgcgcatggcctcggccttggcgacctgctcgatgcagttgtcaaacattttcctgagaaagcggacgaggagtacggggaagatgtcattaaattttgttttatcgggaggccgaacgtcggaaaatcttccctgttcaatgcgattctcggtgaagagcgcgtcattgtcagtgaaatagagggaacgacgagagacgcggtggataccgtctatacttatgaaggccaaacttatgttatgattgatacagcagggatgcgcaaaaaaggaaaagtgtatgaaaacacggaaaaatacagtgtgctgcgcgcattgagggccattgagcgttccgatgtcgtctgtgttgttttaaacggcgaggaagggatccgggaacaggataagcggattgccggctacgcccatgaagcgggccgcggcgtgatcattgtggtaaacaaatgggatgccgttcaaaaagatgaaaaaacaatggatcagtttacgcagaaaatccgggaccatttccagtttcttgattatgcgccggtcatttacgtgtcggcaaaaacaaaaaagaggctggaccagctgttcccgctgcttaagacggtcagcgagaaccatgcgatgcgcgtgaagtccagcgtgctgaatgaagtcataacagatgcggttgcgatgaatccgacgccgacagacaaagggcggcggctgaaaatcttttatgcgacgcaagtctccgtcaaaccgccgacgatcgttgtgtttgtcaatgatcccgaattgatgcatttttcgtacgaacggtttttggaaaaccggatccgtgatgcgtttggttttaccggaacgccgatccatatcatcgcccgtgcgcgtaaataaatataaagagggtgttttatttgtccaaaaaaacgatcgcagtgctcggcgcggggagctggggcactgccttgtcgattgttttggctgataacggctttaaggtcaggttgtggggaaacaaaaaaggccagatcgatgaaatcaatacatcccatacaaacgcgttttatttgccgggcatcaagctgcaacccgcaattaccggcaccttttcacttgaagaagcgttaaacggcattgataccgctgtactggcggtccctacaaaagcggtgcgcgatgtatgcaggcaagtgaaagcggtgcggaaaagcccgctttccatcatccatgtcaccaaagggattgaaccgggttccctgatgcgcatttcggaaatgattgaagaagaaattccggaatcgttgctgcgggatctgacggttttatcggggccgagccatgctgaagaagtcagcctgcgccacccgacaaccgtaaccgtttcatcgaaaaaaatggcagctgccaaaaaagcacaggacatttttatgaactcgaatttccgcgtctatacgaatcccgacatcattggcgtcgaattgggcggttccctgaaaaatattattgcacttgcagccggcatttcggacggcctcggctatggggacaatgcgaaagccgctttaatgacgagagggcttgcggaaatcgcccggctcggcacgaaaatgggcgcaaatccgctgacatttttagggcttgccgggattggcgacctgatcgtgacttgcacgagcgttcactcgcggaactggcgggccggcaatatgctcggcaaaggcaaaaagctcgatgatgtgctggaacagatgggaatggtcgtggaaggcgtccggacaacaaaggcggcgtaccagctctccagccggtacgaagtcaaaatgccgattaccgatgccctttaccatgtcttatttgaaggacttgacccgaaagaagcagtcgacaatttaatgggccggctgaaaaaacatgaaatggaaggtttgatggatgtgctgggggaacagtactagctttccttggcaaaaaagtcccggtaggctttcggatgataccggacggaggcatgctgcataaactgcaaggaaaaagaattcgctttaaactgcgcaggctgggtatagttaaccttttctccggggcagacgtttgccccggcctttttttatgccgtaaattgaaacatttcaaaagcttatgatataatgtccgaagtccgaaaggtttacgaattttacaagggagaaaggggagattgttttgtcccgggggatggcgaatatgtggatttcgcttttcggcatgggcctgctctgtttggcgatggtattgattcttgccagcagatataggctgaaacaaaaactgttcaaatgggcggctgctgtgattgcgtatgcctgcctggcgctgggcggcctgattatggcttatatcgtgctgagcgggccggcaaattaaccggagggggagatcattttgcgcttcaaaaatatgctgctgcttctgaccgttttctcctgcatcagtttaggcggctgcctttatccgggggcacaggaaaaagaaagcaggctgccggatgacatgcagcttcaaatggtgcaaaaagcggtagatgcataccggaaagacaacggcggcctgctcccgatcaagacaaagccgcaaaatacgccggtttacgtaaaatacccgattgatttcaataaactgaaaagcccgaaaaactacctgcccgatccgccggcaaatgcgtatgacaacggcggcaccctgcagtatgtgctgcttgatccggaacatcatccggtggtaaaagtgtttgatacgagaatacccgataaaataagagacttgcaaatccggattgcgtcccagggctatccgccgtttaaaaaagagattgcaagaaatgtatacgctttagattttaaaaagcttggttacaaaacagatccgtacgtggtgtcaccgtataccggccggaaactgccgcttgtcattaccggcagaggcggcatttatgtcgattaccgggttgatctggcaaaagcgctcaaaacgggcaagcgggcgtttaaacccggggaagatatccgcgtgctgttaaccgaaggctctccgtttgtaccggcttattccctcccctgtaccgtaaatcaaaaaaatgaaccggtatttatggcaaaatagtcataaccctttctcatcccaatatattgttagagaaagggtttattttttaggtctcgcgtctcttcgcaaggaaaaattttgaaaaaataaacaggaggcaaatcctgtacagcaactttttgaaaatctataaaaaaatcattttatagacataaggcggtcggacaacatcatacacatataatgtcttatcatcagcgcgaatgatggtgtcccgggaacgaatgtggggagggaaacaaattggaaaaagttgatatttttaaagatattgcagaacgtacgggcggcgatatttatttgggggtcgtgggcgccgtcagaacggggaaatccacttttattaaaaaattcatggaactcgttgtgcttccgaacattacaaacgaagcggacagaaaccgggcgcaggacgaactcccgcaaagcgcggccgggaaaacgattatgacgacagaaccgaaatttgtgccgaaccaggcggttgctgtccatgtcgatgaagggcttgatgtgaatatccggcttgtcgactgtgtcggctacacggttccgggcgcgaaaggatatgaagatgaaaacggcccgcgcatgatccatacgccgtggtatgaagaaccgatttccttccacgaagcggcggaaatcggcacgagaaaggtcattcaggaacattcaagcatcggggttgtgatcacaacagacggcacgatcggcgaaattccgcgtgaggattacgtggaagcggaggaaagggttgttgccgagttaaaagaagtcggaaaaccgtttatcattgttgtcaattcggcaaagccgcaccatccggagacggaaatactgaggacggaattgcaggaaaaatatgatcttccggtgctcgccatgtcagtggaaagcatgcgtgaagccgatgtgctgaatgtgctgcgtgaagcgctgtacgaatttccggtactggaagtcaatgtgaacctgccgagctgggtgatggtgttaaaagaaaaccactggctgcgtgaaaattatcaggacgccgtgaaagaatcggtaaaagacattaagcggctgcgcgatgtggaccgcgttgtccaggcttttaacgaatatgagtttattgaatctgcaagccttgccggcattgaaatggggcaaggggtggcggaaatcgatctcgaggcgccggatgaactgtacgatcaggttttaaaggaaatcgtcggcgttgaaatccgcggcaaggatcatctgctcgagctgatgcaggattttgcccatgcgaaatcggaatacgatcaaatttccgatgctttaaaaatggtgaaacaaaccggctatgggattgcctcaccttccctgcaggatatgagcctggatgagccggaaatcatccgccagggatcccgtttcggcgtccggctgaaagcggtggcgccgtccatccatatgatcaaagtcgatgtcgaatcggaatttgccccgatcatcgggacggaaaagcagagcgaggagcttgtgcggtacctgatgcaggattttgaagatgacccgctgtccatctggaattcggatattttcgggcgcaacttaagttccattgtcagggaaggcatccaggcaaaattatcgctcatgccggaaaatgcccgctataagttaaaagaaacgctcgaacggatcattaacgaagggtcaggcggcctgatcgccattattttgtaagagggataccgcggtatcccttttttgtatccgtgcacccgcaaaatatgttttctgcaagtttgaatttttcgagaaaagtactttaaatccgaaaaaaagttgaaaagttttcctttgttagcgaatagttcttgcacctctcttgcgattatgataatcttttaacagaattggtgctgaaaagcctgattctatccggttttaaacgtttatgatgagggaaaaccgtatacactgaagagaagaagctggaaatgacttctatgtttcttttggaggaggtgaatggaatgaataaaacggatttaatcaatgcagtggcagaagctaccgaactttccaaaaaggatacgacaaaagcagttgacgctatttttgatacaattcaaaatgcattggcaaacggagataaagtccaactgatcgggtttggtaatttcgaagtgcgcgaacgcgctgcccgtaaaggaagaaacccgcaaaccggcgaggaaatcgatattgcggcaagcaaagtgcctgcattcaagccggggaaagcgcttaaagacgcagtgaagtaattacatatggttgctttgagcggaaaaaaggctgcctgggcagcctttttttaatacagcagggtccaaaaaacggaaaaagggaaacgtgcatacgtttggcgcccgttttcccggtgcaaaagcctgtgaaatcccggcacagccggggggagagcctgagcgcggcgttttcggcgctttgactgcaaacggcgctgtggtaagatgaatatatgaaaagctttttaaacgaataaaaggaggaccgaaaatgaaggcagaggcgcaggcagattatatcgtagtgaaagcgttgcaggatggggtaagcgtcattgggctgtcaaggggtaccgatacgaagctgaaccatacggaaatgctggatgatggcgaagtgctggtcgcacagtttaccgaacatacttccatgatcaagattcgcggcgaagcgcaaatcctgaccggcatcgggaatttgcgcagcgaagcgaaaaaataaaccggaatcaatttgttaacggccattttacatatgtgatataataaactacagcttatttttaggccagatcaacgaagaaacggggaaagggttatgtcataccagagggagcagcaaattgccgcaatcaaacaggcgattgaagaagaagtggcacacgactatctaaatcagtttattgatgccccatacatagatgaagaccggattctgcttttgataagcagccttgcggggcagccttatacggaacatgaagtgaagcagtttgttgcgactgccatgctgatccagattgcccttgacacccatgaaaaagtaaccaatgcaaatgaaaatcaaaaaagccgccagcttaccgttctggcgggggattatttcagcagcctttactacaaactgcttgcgggcgtgcacaacgtccggcttgtcggcatactggcggaaggaatcaaatccgtaaatgaatataaagtgatgctttaccaatttgacaattccgacgcggagacgttcgtcgggcatttgaaaaaaaccgaatccgcgattattacaaaatttatgcagtttttcggttcacagccgctcatccgcttaagcgaggaactgcttttgtttaaccggctgctaagggaaaaggagcaggccgaaaacgggaagcgctccatcctgtttgaagccctgaacaaaatggcctacccgggtgacgggcgcccttttgagcagctgccgcatgagaaaaagcgaaaactgttttatatttgtgagaagtatttgaaagaaagcattcgtgcgttgcaggctgcggccatgtcttgcggaaacgaaatgctttcagagcggatccgcctgctgatggggcggtatggcgatgcaacgagattatatgcggaggaagggtaaccatgatgccaaaagaagagcgggtacacgccgttttcgaaaaaatttcgcaaaactacgacaagatgaactcggtgatcagcttcagccagcataagcggtggcggaaagacctgatgcggaaaatggcggtaagagaagggagcagcgcactcgatctgtgctgcgggacggcggactggacgattgccctcgcacaggcagtgggcgaatccggtagcgtgacagggctcgatttcagtgaaagcatgcttgaagtcgggaggcggaaagtggaagcgctcggcttgaaaaatgtcgcgctccgttacggaaacgcaatggaactgccgtttgaagatgaaacgtttgattatgtgacggtcgggttcgggcttaggaatgtcccggactacaaacaggttttgcaggaaatgtacagggtgctgaagcccggcggcatggcggcctgcctggaaacctcccagccggtaattcccgggtacaggcagctttattacttttatttccgccggatcatgccgcttctcggacaatggttggcaaaaagctaccgggaatattcttggcttcaggaatctgcactgcagtttcctggaatggaagaactggcggctgcattttccgacgcgggttttggccggattttgtacaagccgtttgccggcggggcttcagctgcacatattgccttgaaagagaaatgatgatcggatggagacggaatgaaggtacaaatgctgtactcgtttttaaaaacggatattgagcttattgaacaagagctggccaacgctgtcgcatcaaatgctgctttgatacagcaggcatctgaaagtttgctgaaagcgggaggaaaaaggatccgccccgtatttgtgctgctcggcgcgaaattcggggattacgaaatcgaacgtgtcaaaaatgtcgctgttgcactggaattgatccatatggcgtcgctcgtgcatgatgatgtcattgatgatgccgaactgcgcaggggaaagccgaccgtaaaagccaaatgggacaaccggattgccatgtatacgggcgattatattctcgcaaccgcgcttgaatacattacaaaagtggaggatctctccgcccaccagattctggcagatacacttgttgaagtgtgcgtcggcgaaatcgaacaaatcaaggataaataccggtttaatcagaatttgcgctgttacttaaggcggattaagcggaaaacggctttgctgattgctgccagctgccagctcggggcgattgcagcgggcgctgacgaaaaaactcaccgccaattataccggtttggctacaatgtcgggatgagctatcaaattattgatgatatcctggattttaccggcacggagaagcagctcgggaaaccggcaggcgaagatttgcgccagggcaatgtaacgctcccggtgctttttgcaagggaagacccaaaaatcagaaagatgcttgaaaccgtccatgagcacatgccaaaagcggagcttgagggcgttgtcagactggtcaaacaatccggcgcgatcgaacaatcctatgcaattagcaactgctacctcgggaaagcgctcggtacgcttgagcagctcccggatacccgctttaaaaaaatgctggcagatttggcgcgttatatgggaaaaagaaagttttaaaagaaagcagggctgccgggcagtgccctgcattggcggcccggttttgaagcgcttacttcaaacatattgagattttcccgccatcatggtacgattttctatggctaagatgccttacatagtagaaatgcgaatggagtggatgaagatggaaaggacttttttaatggtaaaaccggatggggtcagccgccagctgatcggcgaaatcgtttcccgctttgaaaagaaagggtttcggcttgcgggggcaaaattgatgcaaatttcagatgaacttgcaaaaaagcattacgctgagcataaagagcgcccttttttcaatgatctcgtggcatttattacttccggtccggtctttgccatggtttgggaaggcgaaaacgtcatcgccaccgcacggcaaatgatgggcaaaacgaatccggccgaagccgccccggggacgatccgcggcgattacggcgtgattgtcagcaaaaacattattcacggttccgactcaccagaaagcgcgaaacgtgaaatttccctgtttttccgggaagacgagctgatctcatacagccggccggcggatactttgatttattaaatcatgcaaaaaaagattggcgatcctctccgcgccaatctttttttatgttaaaataaacggtatgaactaccaaatctgaataaaaatacggagattgcataatgaaaacagaactggatgaatacggccggttcattgcgcaagtcaaaaagaaaacggggatcgatttatctttgtataaagaagcgcaaatgaaaagaaggctgacgacattatatgaaaaaagaggtttttcatctttcagtgaattttttcaaggactggacaaaaacgaacgtttgctggaagaatttttggacagaatgacgattaatgtttcagaattttacagaaataagtcgaggtgggatgtgctcgaacggaacattttgcccgggctgctgaaagaaaaaggagaaaaactgaaaatctggagtgccgcttcctctacgggcgaagaaccgtatacgatggccatgatcctgtcaaagtatttgccgcttaataagattcagatcctggcgaccgatattgatcaaaaagccctgcagaaagcagaagccggcgtttattccgaacgttcgatccttgaggtgccgcgcgaaatgaaacaaaaatattttcaaaaaagcggcgggggcccgttctatcaaattgcggacgaaatcaggcggtcggtgatattcaaacaacataatctgctgcacgacccttatccagcagcggatctgattatttgccggaacgtgctgatttactttacagaagaagccaaagtgtctgtttaccggaatttcagcaaaacgctgtcggcaaacggcatattatttgtcggtagcacggaacagattttcaatccggccgcgtatggatttgaaattgaagatacctttttctataaaaaaatataaagcgctccatccatctattcgatttaccgggatttgtggtatagtaatagatatgtaatgctttaaagtgatgaagggggatgcagaatgagatatttgacggcaggcgagtcacacggaccggcgctgaccaccattattgaaggccttccggcgggcatgccgctgacagctgaagaaattaacactgaccttgccagaaggcagaaaggttacgggcgggggcggagaatgcagatagaaaaagatagggcaatgatttctgccggcgtccgccacggattgacgctcggttcgccggttgcgctcacggttgaaaacagggactgggtgcactggaataagatcatgggcattgagccccttcctgaagatgcggacgacgtgaaacggcgtgtgacccgcccgcgcccggggcatgccgatcttgtcggcgggatcaaatacgggcacagggatttgcgcaatgtgctcgaacgctcttccgcacgcgagaccaccgttcgtgtggctgccggggctgtcgcgaaaaaattgctgaaagagctcggcatcgaagtggcctcgcacgtgcttgaaatcgggggtgtccgcgcggaaaaggtgccatatgattcccttgcttccttgcaggaaaaagcggacggttcaccggtacgctgtttggatgacggggcggcgcaaaaaatgatggaagccatcgacacggcaaagaaaaacggcgactcgatcggcggcattgtcgaagtgatcgcaaccgggatgccggccggtgttggcagttatgttcattacgaccggaagctggatgccaggctcgcgcgcgccatcatcagcatcaatgcgtttaaaggggtggaattcgggcttggctttgaaatggcacaccggcccgggagcgaagtccatgatgaaatcgcctggtcggaagaaacgggctatacgcgcaaaacaaaccggctcggcggctttgaaggcggtatgacaaccggcatgccgattgtcgtaagaggcgtaatgaagccgatcccgacattgtataagccgcttcaaagcgttgatatcgaaacgaaggaaccttttgcagcgagcatcgaacgttccgacagctgtgcggtgccggcagcaagcgtcgtctgtgaggccgttgtcgcctgggagttggcggaagcgatcaccgaccagttttacagcgacaggatggatgtgctgaaaaaaacggttgcggagcaaagagaatacggaaggttgttttaaatggaaacgatcatcattgatacagaaacaaaacagtacccggtatacatagcaagcggcgcgctgcaggagttgggcccgctcgtccgcaaatatacgcgctgcatggtcataacggatcaaaacgtccggccgcttcacttggacaaactgctttcgcagcttccggaaagcgcggaacagtgtgtactgaccgtgccaggcggggaagatgccaaaacgtttgaagtctaccaggaagctttgacgtttgccgtggaacatcatttagaccggaaatcatgcattcttgcctttggcgggggcgcggtcggcgatcttgccggttttgtggcggcaacctatatgcgcggcattgcgtttattcaaatcccgacaaccattttggctcatgacagcgcggtcggcggcaaagtggcgatcaatcacccgcttggaaaaaacctcgtcggcgctttttaccagccggaatttgtattgtatgacacggatttcctgcgcacgctccccaaaaagcagctgttaagcggatttgccgaacttgtaaagcatgcgcttctttcggatggggagttccttaaagaattacaaacaaagattccggacggcgggcatcttttatccccgcatcttccggacttgttgaaaaaaaggatcaaagtaaaggcggatatcgtcggcaaagatgaaaaagaaacgggtgtgcgtgcctttttgaatttcgggcatacgctcgggcatgcccttgaggcgcacggcgggttcgggaaaatcacccatggcgaagcggtcatgaccggcatcgtttacgctcttttgatcagcagggaacagaccggccttcaatttgacttgccacaatttctcagctggatcgaaacgctcggctatgattggaaaattccggctggcgcagcatttgacgaaatctatgcttatatgaaacgcgataaaaaaacaattgccggcaatattcacttcgtcctgcttgcgtctgtcggcaaaccagtgctggctgaagtggacaaagaacggctgagccgtctgtttctgctgcagcaaaagggggatttgcatacatgatacgcggaatacgcggagcgactacggtcgagcgcgatcacgaaagcgaagtccttgctgctacttctgagctgatgaatgccttgatcgaaaaaaacgggatcaagccggaccgggtcgcttcccttttgttctcggcaacagccgatatccgttcggcttttccttcgaaagtcatgcgccaattcagcggctggaagtatgtcccgattatgaatatgcaagaaattccggttgaagggagccttgcccgctgcatccgcatcctgatccatgttgacacggaccttgggcaggaggacgtaaagcacgtgtatttgcgccgtgcagctgcgctccggccggatttaacagaataaaagaattttaacgcgccacgaaccgaaaggagagaatgcgatcacccccccggcttgcgctgtggaagccggggaccctcgcaaaagatgatgaaatggagaacacaaattacggatttagaagcatatgtgcccggaaagaccattgatgaagtgaaaaaacaatacaggctcgattcaatcgtaaaactggcatccaatgaaaatccgttcggctattccccgaaagtggataaggctttgaaaaactttcagcctgcttttacccgttatccggacgggcacgccgcacaactgagacagaaaatggccgcacatctcggcgttgatccaaccgaactgatttttacaaacggcacggacgaactgatccaaatcgtttccaggtcactcctcgaaccgggcaaaaatacggtgatggccgcaccgacattttcccaatacaaacataatgccatcatcgagggcgccgaagtccgtgaagtacccttaaaagacgggcggcatgacctggaggcgatgctcgggcaaattgatgaaaacacggcggttgtctggatttgcagcccgaacaatccgacggggacgtatacgaccgaacaggagttgaccgcttttcttgaccgcgtgccagaagacgtgctcgtttttatcgatgaagcgtacagcgaatacgtggtcgcaaaagattacgaacaggcacttgtcttattccgccggtatcatcatttgattgtcagccggaccttttcgaaaatttacggactggccggtttacgcgttggctacgggattgccgatcgaacgatcatccaaaagctcgagccggtgcgcccgccatttaataccaatgtccttggccagctggctgcacaggcggcgttggaggaccagacgtttatccagagctgccgcgacaaaaaccggcaggggctcgaacgcttttatgcgttttgccgccgcaacagccttgcattttacccgtcacaggcaaattttattttaatcgattttcaatgcgatagtgaggaagtttgccggtttttgcttggcaggggatatatcgtccgctccggggaagcactcgggatgccggggacggtccgggttaccatcgggtcggaagaacaaaaccggggcgtactcgaggcgatcggggcttttctggaaagccgcaaatgaacttgacaacggcgggccttttgacagcaaaaggccgcctttttacaaaaaagaggtggcacctttgaaaggaaatgtgtttgtgatcgggctcggattaatcggggggtccattgccctgaccattaaaaaggaacatccggaagcaagggtcacagggtatgatgccaaattggaagagatgaaaatggcaaaagccctgatggtcgtggatgattacgtggaaacgatccaagacggcgtgcgtggcgcggatttaattatattggccacgccggtgcttgtaacggaaaaattgatcgggcagctcgggcaaatggaattgaaggaaaatgtgatcatcaccgatacgggcagcacgaaagcaagcatcatggcaaaggcgcagcggctcgccggcaacaacaccgtttttatcggcgggcatccgatggccggttcccataaaagcggcgttacggccgccagcctgtccctgtttgaaaatgccttttatttgcttacgcctttccatgaacaagatcagcggacggaagaattgaaacagtggctgaaaggaacaaaggcaaatttcatcaccgtttctccggaaatgcatgatgaaatggttgcagtcatcagccattttccgcatgttatcgcagcgtcacttgtccatcttgtgaaagacgctgatgcggagtatccccttttaaaaaggcttgctgccggggggttccgtgatattacacggattgcctcctcaaacccgcaaatgtgggcggacatctctagcggcaacagggaaaacctgatcaggcttttggacagatgggcggaaaatcttcaggaagtgaaaaaggcgcttgcagacaacaagtatgagcttctgcaccgcttttatgcggaagcaaaacaataccgcgactgccttccaatcagtggatcgggcgcaatcccgtctttttacgatttatttgtcgatattccggatgtcccgggggttgtatctgaaattaccaataaactggcggaaaaaggaatttctattacgaatatacgcattcttgaggcgcgggaagatatatacggcgtgctccggatcagttttcgctcggaaaacgaccgtgatctagccatgaatcttttaaaaaaagaaaccccgcatgaagtctatatccaatagaaggtggtggctgcaatggaaaaattggcacccgcgcaaacagggttaaaaggtacgattaaagttccgggggataaatcgatttcccaccggtcggttatgtttgccgctgtcgccagcggaaaaacggttgtaaaaaattttctccccggcgccgactgtttgagcaccattcattgttttcagcaaatgggcgtgccgatcgaacgggatggcacccgggtggtgattgatggaaaaggatgggacggtttgtcggagccggaaacggtgctcgataccggaaactccggcacgacgacccgcctgatgctcggtcttcttgccggccggcccttccattcggtcattgccggcgacgaatcgattgcaaagcgcccgatgcaacgcgtcacaaaaccgctttgcgaaatgggcgcgcacattgacggaagaaggggcggcaatttcacccctctttctataaggggcggggcgcttcggggaatcgaataccagctgcctgtagcaagcgcgcaggtaaaatccgcgctcctcttagccggccttcaggcagacggctctaccattgtgcatgagccgcagcccacccgcgaccatactgaacggatgatccgggcgtttggcggcgctgtcaagacggaagggagaacgatttccgtccggggtggcgcggttttccatggcacggagatcgatgtgcccggcgatatctcatccgccgccttttttatggctgctgcttcgcttgtgcccggaagtgaaatcgtcttgccggatgtcgggctcaatccgacccgcgccgggatccttgatgttttaaagcaaatgggcgcggatatggaagtggccgaaatgcaggccccgcatgccccgtccggcggagagccaaaaggcacattggtgatccgcccggctgttttacagggggtggaaatcggcggcgggctgattccgcgcctgattgatgaaattccaatcattgccctacttgccacacaggcagaaggcaggacggtcatcaaagatgccgcagaactgaaagtgaaagagacaaaccggattgacacggttgtccgggaattgaagaaactgggcgcccaaattgaggcgacagcggatggcatgatcattgaaggcccttgccggctttcaggcgggacggtggaaagccacggggatcacagaatcgggatgatgcttgccgttgcatcacttgtggcaaaggatgctgtctgcctggatggggcggaagcaatcgccgtatcatacccgcagttttttgatgatctgaaatccgttctgtaacggctttagacgcctattgaaaacagacaccagcaatcagccggtgtctgttttcaggataacagagaacaggcgcctgatcatgatgtccgtggaaaagcggggtgcggaaattcaaaatcccgtgccccgctttatttttgctgtgaaaaaaagggattttcatgcacggcggagaaatacttaaacaggaaacccggaaaggcaaatgatttgccctggccttcaaaattctttatgatttagccaaggacacccacggcttttcctgcaggcaagcgggcttccgggaaaagggccgattgccatttcaccaggggaccgggggagcgcttttagcggcaaccgggattttggctttgcaaaaatccacggctcccgttgcaagaggttcagcaaaaggaaacacatcaaagattaaaggaagattttcatgagcttaatggaacaattgttggatcatttggaagaaggccggctcgaggaggcgaaaaaaacatttgaagattttctcgcgctcggcacggacgaagagaaatatgcgcttgccgggcagcttgagggcctcggttttctgaatgaagcacagcaattatataaagatttgcttgcgtcttatccggatgacggcgagcttgtgatcttaatggcggaaacgcttattgatatggacaaggaagaagaagccatattatacctcgaccgcattccggagacggaccccgattacccgcgtgcactgcttttgcttgcggatttgtatcaaatgcagggcctgtatgaggtcagcgaaaacaaactgatggaagctgcatcgcttttgccggaagaacctgtcatccattttgcgcttgccgagttctacacttcctgtgcccgatatgcggaagcttcccgtgaatatgagtggcttttgggcaaagggatcgatacatttgcggatacaaacatccacgggcgccttgcagaagtgctgagcgcagcgggcgcgtttgaagaggccttgcaccaatatgagcatgccatggagggccgctttgaggcgaacacattatttggatatgccttaaccgcgtaccaggcaggattttatgaaaaagcgatagagctgtttgaagaattgcgggaaacggatcccggctaccatccgctttacctgtatcttggccgtgcatatgagcacgaacaaatgccggaagaagcgcttgctgctgctgaaaagggcataaaagaagacgagtatgataaagaactttatcattttgctggaaaaatggctacaaaagcaggcgatgaggaaaaagcggaaaattattttaaaaaagcgctggaactggatcccggctatttggatgcggccctttcctacaacgagctgctgcttcaaaaggagcggtacgaagaagtccgtgaccgggccctcagcatggaaaaagaaggggataccgaccctcggctttactgggatctggccatatcgcttaagcatttggaagaatattctcaggcattaaagtattatggatatgcatataatgatttacaaaacgacacggtgtttctggaggattacggttattttctgattgaagaagggagaaggaaagaggcttacggcattttccaaaagcttttgcgcgaagatccggcaaatgatgaatggattgcacttcttgaaaggcttgaagacggaaattaattgcggccatcgttgccggactttttcgtaggcggtttagacgggaaaaggtataatgaaggtgtaaaccaatgttttatcaaaaaagctgcccgctgtaaacacggccattcaatttgcagaggagggattacgatggctctcacccctgtttcaatcaacgagaaaaaggagtttatccgttggtttttaaatcattaccaattaaaaagacgggagtcagtctggatcttgaattatttaatgggccacgaccagctgatggaaaaagtccatttcgtcgaggaagcgcatctttgcccgcgcggcattatcatgtcgacgcattgcgtggacaatgtgccgttccgcttttataaagataatattatgacaacggatgcggaaaagtctttccatgatatccggctgaaccgtgaagaagacatttatatccagctcaatttcaaaaaatcccaattatcgtaccagtatgcggctgtgcttgaagaaaacccgtatatgccgaaagatctccatataaacgagacagaccggcaaatggcggaaaaattattggagaaaagcatgaaagattttaaacggaataaactgcgagaagaaatcgacaaagcgctcgatgagaaagattacagccgttttgtcgaattaagcggggagatgaaagaactggacgattaatcattccggtttctgcccgtggggaaaatgaaaggggtatcattcgtgctctggcgtgcaaatgacatggaattgtaccaacaggaacgttactttattgacacggcagtcctgccgcttgtcccggtttcattcggggaccgtatccggcagctcgcttccggatatgaatggatccagatgatcgcaggctgccttgagtcgcaatttaaaggccggattgttttgctgcccgctttcccatatttgcagcaggcgatcccggatagcgcggggcctgccatcaagtcatgggaagccgaattggctgaaagcgggttccggcatattttttatttgaccagcgatcccgggtggcaaaggctccaggccgaactgaacggaaatgtgctctggatgccggctgtcccgcttgaacatatggaacagaaacagcgagatgccattgtggatgaacaggtgaaacagcttatctccaccattgtccggtcatggggggaaaactgaaaaagttatattaaaatatcagtttatttcgaatagaaagatatttggcataaaatagacaatattcattgaccggcaaatatctttgctttatcataagagtgtatttgctgcatcttgaaaatagtatgaaaccgagagttctgtaagggggggaacaggttgagcaaaaaagatccggtgtcaaggaggcagtttttaaattacacgctgatgggcgtaggcggatttatggctgcgggtgcgctgatgccaatgctccgttttgccgtcgacccggtgctcgaggcggaagcagccggcgactttcatccaaccaaattgaaagtttccgatattaagagcgaaccggtgcgtgtcgattttaaatacgaacagacagacggctggtataaatcggatgtcacccagacggcctgggtgtataaagacagcaaaggcgatattgtggcactttcaccggtttgcaaacatctcggctgtaccgtgaactggaatacgaacaaagcgcatccgaatcagtttttttgcccttgccacggcggacggtatgagaaaaacgggaaaaacgtaccgggaacaccaccttccgcgcctttggatgcataccctgtcaaaacaaagggcggctatctgtatctgggcaaaccgcagaaaaatccatatgtgaagtgagggggaagagatgcttagcaaattgtatgactgggtcgacgagcgccttgatattacgccgctttggcgggatattgccgaccatgaagtgccggagcatgtcaacccggcgcaccatttttccgcttttgtctattgttttggggggctcactttctttataacagccatccagattctgtcgggtatgtttttaacgatgtactatgtcccggatattaaaaatgcctggcactctgtctattatttgcagcatgatgtggcatacggccagattgtgagaggaatgcaccactggggggcaagcctcgtcatcgtcatgatgtttttacatacgctgcgggtgtttttccagggcgcatacaagaagccgcgcgagctgaactggattgtcggcgtgctcatctttttcgtcatgctcgggctcggcctcacaggttatttgcttccgtgggatatgaaagcgctttttgcgacaaaagtcagcctgcagattgcggattcggtgccgtttatcgggccgtatattaaaacgcttttggccggccatccggatattgtcggcgcccagacgctgacgcgtttttttgccatccatgtctttttcctgccggcggtgctgatgctgcttttggcagcccattttttgatgatccgcaagcagggaatttccggaccgctgtaatgtataagtatccataacgggcaaaaggagggggaaggatgcatcgcggaaaaggaatgagatttgttggcgattccagaattaatgcggaccgcaaaccgaatattccaaaggattactcggagtatcccggtaaaacggaagctttttggccgaactttttgttgaaagagtggctcgtcggcgctgtttttcttgtcggctttttatgcctcacagccgcgcacccgtcgccgcttgagcggattgcagacccgacggacacaagttatattccgatgccggactggtattttctattcctgtatgaattattaaagtatacttattcttccggcccgtaccaggtaattgggctcgcgatcccgggcgttgcttttcttgcactgctgttggcgccgtttattgaccgcggccctaagcggcggccgcttgacaggccccttgcaaccgtgtttatgctgctcgcggtttgtgcgatattctacctgacatgggaagcggcagcccaccacgattggaaaaaagcgaaagagcaggggaaaatcgtgaaacaggtttccattgacaaaaatgctgaaggctataaagtatttgccaagcagacgtgtgtaacgtgccacggggaaaatctccagggcagtgcggcagctccttctttggtcggcacaggcttaagtgcggatgaaattgcaaagattgccaaaaaaggcaaagggaaaatgccgcctaaccaatttaaaggctcggatcaggatttgaaaaaactggcggattatatcgccgggctaaaatcgaaataaaagcaaaaaaagccggtttctgccggcttttttcatgctttctgttttgttaaaatgagcctatcatttttgaaatgggggaaaacgatgaatgtaccggcattgtatgcggcgctggcagacaggcgtgtcctttggctgctttttttagccaatgctgcagggaccatttatggttacatttggtacgggtggcagcttcgcgatacgccgcccgcgttttggctgtttgtcccggacagcccgaccgcaagcctgttctttctgtttgtgctgcttgcctttttatggcggaaacactggccgtatgtggaggcgcttgcaatggtgacactttttaaatacgggatttgggcggttgcgatgaactttctcgtgctgatcgtaaacggctcattgccatggcagggatatatgctgatggcttcccatttggcaatggcgatagagggaatattgtatgcgccgttttaccaattcaaatggaagcatcttttggttgcggcggtatgggctttgcacaatgatatcattgactacgtttttatgcagtttccccggtacgaagatgtataccggtacatccgtgaaatcggctattttaccttttggctgagcatcctgtctgttttgcttgcataccggtttgccatgcacaaaaggcggctccgcctcgaactttaaatcgctttttccgccggcagaaaacaggaattcccgaaatggacgccaggctgtttttatggtctactcttgtccttcccttcataagttagtaacaatatgaggggggacaaggatgaggagaaaagtagtgatccttctttgtgtgttcatgttaagttttgccggaaaaagttttgcaaaaggttcggatgatgctttggcacatttaaatgacctaagcgacgaggcattgcagctggcgaaaaacgggcaatatgcagaagcaaaaaatgtgctgaatgaattttcgaaaacattttccaggcaatcgtttaaaaataaacgtttaacgatggatgaattgagagttttgaccgtcactcatgatgaagcggtaaaggcgttgacgaaagtaagcgcagagcctgaggagaaagtggatgcctgcacgtcattccggctcgtggtggatgcgatccaatcgaagtatcagccgctctggacgcagatggaagggccggtgatgtcttcatttacagaggtgcaaaaagcagccgcaacagggaagcgtgaaacgtacaacgaaaaattaaacctgttcctcaaacaatatgcagtgatcgagccgagtttaagagtggatctgccggttgaaaaaatacagcggctcgattcgaaaatcgcttatattgaccgttatcgggacaaggtggcaggcagcgggtccggaaaaaaggagctggaggcgctccggacagatttaaagcagctgtttgaagccatgaaggaagatgaagccgacccctccctctggtggattatgatttccaccggcagcatcatcattcttactttatcgtatgtcggatggagaaaatacaaagggcaaaaagaagagcgtcacgagaccgatcatatggattgaccttttgaccttattcggatacaataaaagtaagataaccatggaggttatggagggtggcaaatgtcgtttttgatttactatctcattttgacgatcattccgatctgggcccagctgaaggtaagaaacacatacagtaagtatgaaaaggtcgcaaatgcatccggcatgacaggcgccgaggtggcaaggatgatcttggacgaaaatggcttataccatgtgaaagtgctagaacacagcggctttctgagcgaccattacaatccgattaacaaaaccgtcaatttgtcgactgccaactaccacgggcgttcgattgcgggtgcggctgttgcggcgcacgaatgcggacacgctattcaggataaagtcaactacgggccgctccgtttccgccaccgccttgtgcctgtggcgaatatcggcagcaacgcctcttggatttttattttgatcgggatgttcacgcatgcgacaggcatgttcctgcttggtattattctgatggggcttgccgtgttgttccagcttgtgacattgccggttgaattcaatgcgtcgtcacgtgcgcttgcccaaatgacgtcgctcggcatcgtccgcggcggggaagaaagggaagcgcgcaaagtgttatcggctgccgcgctgacatatgtagctgccgcggcggttgcggtcattgaattgctgcgtttaatcctcatctttaccaacttaaacggcaataacaacaataattgacagtacgaaaagctttccggggtgtatcggcaacccggaaagctttttttcgtcttgctgcatgtgccggtttgcattataatgaagaagtttggttgtttccaacccgtggttcgaaaccatcccacgtaaaaaaactaaggagagatgcatatgaaactgaaaacactcgtcgtcaacggggttgtcgcggcactgtatattgcggtgacattttttatccagccgcttgcgtttatgaacgtccagttccgtgtttctgaaatttttaaccatctcgttgtgtttaacaagaagtatatgatcggtatagtggcaggcgtttttctctcaaacttgtttttctcgccgatcaagtatgatatgttcatcggtacagcccagtccgtccttgcgcttgcgattaccattttatccgcacggtttataaagggcgtctggggacagatgatccttaattccattgcttttacggcctccatgtttattatcgcatgggaaatgcaatggtttaacggcgtgcctttctttttcggctggctgacggcaggtgccggcgagctagccgtgatgctgattggaatgccggttatctacctgatcaacaaacgcctgcattttgaaaaacaggtttaaaaaagagctgccgcggcagctcttttttaatcttcaatcggctgtttattctcatcaagcgtaaagccttccccgagcacatcatggaccaccatcatcgacacgaaagcatgggggtcaacggaatggataatgccttttaaacgggacacctcatgttttccgacgacacagtacagcacatcccggtcctgtttcgtgaacatgccgtgcccgcgaaaaacggtaacgccgcggtccatctgcttcatgactttctcggcaatttcatcatgcttgtccgaaatgataaaagcgcctctagccgtataggccccttcctgcagaaaatcgacaactcgcgagccgacaaaaacggcaacgagcgtgtacatcgcttcccggtaatgcaggtaggtgataagcgacagcgtaatcacgcatgcgtcgaacatgaacatggtcctgcccattgccacgcctttatatttaaatacgagcctggcaatgatatcgacacctcccgatgtccccccgtagcggaaaataatcccgagcccgatgccgataaataccccggcaaacagcgccgcaagaaacatatcatcgcgaagcggaatatggaaatgtttcttttcaaatatccataaaaaaagagaggagccgaccgtcccgaccagtgtatagtaaaacgatttttttccaagcagcttccatccgacaaaaaatacggggatattcaaaatcagattggagtaagaggggttgatgtgaaataaatagtaaagcagcagcgtaattccggtaaaaccgccttccgccagatgattctggatattaaaatggacaatgccaaaggcaaagatgcaagagccgagcaggataaaaaagatgtttttcattttcagcataatccgtatcctccttccccggtatatatccggcgttcccattatagcgaaagcggtacaaaagggcaatcaggcagagagaaaagcaaatatatgatttgtaaaatctgccgtttttggctaacatggaagaggattacaggattgggggatgaaaatggcagaaaacaaaacgatccggcaaatgcaaaaagaagtcgatgattatatcagccagtttaaagaagggtacttcagtccgcttgcgcttacagcaaggctgacggaagaacttggagagctggcgcgcgaaatcaatcattattacggggaaaaaccgaaaaaaccggatgagaagccgaaaaccgtagcagaagagctcggcgatttgctgtttgtcgtcatttgcatggcaaatgctttacatattgatttacaggaagcccatacaatggttttgcagaaatttaatacgcgtgataaagacagatggacgcgtaaagagcaggaggagtaatgaaacatggatgatattcggattattgttgccggggcccgcgggaaaatggggagcgaggcggtgcggctgatcgagcggacggaacattttaaactcgttggcgtagtggacaggacttttgacggcaaactgttcaatgatgtatccgattataacggcgaaccggtccgggtgtataccgacccggaagcatgccttgaaaactgcccggcggatgtatggattgatttgacggtgccgaaagcagggttcctccatgcgaaaacggctctcgcacattgtgtccgtccggttgtcgggacgaccgggtttaccgatgcggaactggaagaactaaaggctgtttccgcacaaaaaggaatcggctgtatcattgcaccgaattttgctgtcggggcagtgctgatgatgaaatttgcgcaaatggcggcgaaatatttcccggatgtggaaatcatcgagctgcaccatgaccggaaaaaagatgccccgtccggcacgagcgtaaaaacggcgcaaatgatctcggaagcaagaagaaaaaaaacacaggggcatccggatgaaaaagaaacattacaaggtgcaagaggcgcggattttgaaggcatgcatatccacagcgtccgcctgcccggccttgtcgcccaccaggaagtgctgttcggcggggacggccagctgcttacgatccgtcatgactcgatggatcgcgcatctttcatgtcaggggtgaaagtagccgttgaaacggtgatgaacctcaatacatttgtttacgggctcgaaaatattttggattaaccggaaggaggaaaggaaatggctggcaaggtggatattctcgctttcggggcccatgccgacgatgtcgaaatcggcatggcggcatccattgccaaatgggcatcgatggggaaaaaattgcgatatgcgatttgacagaagcggagctgtcttcgaacgggacggttgaaaaccgcaaaaaagaggcacaaaactcggcagcttgcctcggggttagagaaagagtaacgctgaaattgccggaccgcggcctttttatgcaagcggacgctatccgcgcgattaccggcgtcattcggaagtttcagccggatgtcgtgtttgcgccttttcatgaagaccgccatcccgatcacggtaactgcggcaggcttacagaggaagcctttttttcagccggcatcaggaaataccgttctgaaccggatcttccttcccataaaccgaaacatctttatttttatatggtaaacggttttcatccgcccgattttgtcgtcgatgtcaccaactttatggacaaaaaacttgagagtctccatgcctatgaaagccagttttcgattcgggaaagaagtgtccataccccgcttacggatggctatattgaagcggtcactgcgcgcgagaggatgttcgggaaagagctcggggtgaaatatgcagaagggtttttaagcaaaacaccggttcttgtgaatttggatgtgctcgatttatgaaaaagttaaaaatcgggattacgtgctatccgaccgtaggcggatccggcgtcattgcaacggaacttggccagctgcttgccgaaaacggccatgagatccattttattacctcgagtgtcccgttccggctcaataaaatgtacccgaatatttatacccatcaggtggaagtgaaccagtacgccgtctttcaatatccgccttatgatattgcgcttgcctctaaaatcgcggaagtggcggaaagggaacagctggatgtgctccatgtccattatgcgattccacacgccatctgcgccattctcggcaaaatgatgaccggtacccggatgaaaatcgtgaccaccctgcacggcacggacatcaccgtgctcgggtatgacccgtcgcttgtctccgccatccggttcgggattgaacggtcggatgcagtgacggcggtttccgatgcacttgtccggcaaacgtatgatttgatccggccgcagaaaaacatttcgacggtttataattttgtcgatgaacgcgtataccggaaaatggaggcaggccatttaaaacaggattacggcatttcggaaaaggaaaaagtgctgattcacgtttccaatttccgggcggtaaagcgcgtgcccgatgtcgtcaaggcttttgcgaaagtgcgggcacaaatgccggcaaaactgctccttgtcggcgacgggccggaaatgaccgtcgtctcccggctcgttgcccaatgcggtatagaaaaagatgtcttgtttttaggaaagcaggaccggatcgaggagctgtacgcaatcagcgatttgatgctgcttttatcggaaaaggaaagtttcggccttgttgcgcttgaagcgatggcgtgcggcgtcccgtgcattggcacccgggttggcgggattccggaagtgataacagacgggatgaacggctatttgtgcgggctgggcgatgttgaagccgttgccggaaaagccatccggctgcttgaggatccgggcctttatgctgcgttttcgaaagcgtgcgaaaagacggtaaaagataaattttattcccgcaacattttgaaacaatatgaacaaatatatgaacaaacggtaaatgaggttgatggacatgctcccgccatttcagacggcgcttcccattatccggacgcttgaagatgcagggttcaaagctttttttgtcgggggatcgatccgcgacagcctgcttgggcggccggtgcacgatgtcgatattgccacctcggcgaaaccggaagaggtaaaggcactttttacacatactgtcgacatcggcattgaacatggaacagtgcttgtattgtataaaggaaaccagtatgagatcacgacgttccggaccgagtcggtatataaagattaccggcgcccggaatcggttgaatatgtggactcattgcttgaagatttaaaacggcgcgacttcacgatgaatgcgatggcgatggataaaaacgggaaactgattgatccgtttgcaggcagtgaagccatccggatgaagcggattgaaacggtcggatcccctgaagaaagattccgggaagacgcgcttcggatgatgcgggccgcccggtttacgagccagctcggtttttggattgaagacgggacgaaacaggccatcaagcgccatgcaccgcttatccggcatattgccgttgagcggattacccaggaatttatcaaattgctggaaggagagcatccgtatgaagcgctgcaactgcttcaagaaaccgggctgctcgggtttctgcccggtctttgcggcagggaagcgcagcttttttctgccctgcacccggtgttaaacgaattgtcagaacaacagctttgggtgtacctagttgcaaccgcagacccggaagatgccaacacttttttgcgaaaatggaaactgccgaatgaaaaacggaaagccatcgtgcgtacgctcggttttttcaggatgcgcgccgggcgaaagtgggatccacttatgctctacgatgccggcgaacaaatggcattggatgctgaagcggttttctgcgcttttcgccgtgaaaacccttcgccccgcattgccgccctccggcaggctttccggaaattgccggtgaaaaaccgcaacgagctggcaatcgacgggaaaaagctgatggcgcttttttcgaaaaaaggcggcccgtggctgaaagaaatgcttcgtgagattgaaaaagcgctgataaacggcgaaatcgaaaaccaatatgaggcaatccggaggtgggttttgtgcaaatatccacaagagaaaaaataatagaactgctgacggaagcaggggacggctttgtatcgggagaaacgctggcgaaaaaactgaactgctcgcgggcggcagtttggaagcatatggaagagctgcgcaaagaaggttttgaattggaagcggtccggaaaaaagggtaccgtgttaaagcaacgggcgataaagtgacggaaaatgaaatccggtacgggctcgggacaaaacggcttgcaagaaacatccattaccgggaaacgatcgattcgacccagcggctcgcgcaccagctcgtacaggaaggctgtcccgacggcacgcttgttatcgctgagcagcaaacggggggaaggggcaggctcaggcggtcctggtactcccctaaatataccggtatctggatgagcattgtcctgcggccggatcttccgccgcaaatggcgcccccgtttacgctcattgccgccgttgctgttgcgcaggcaatcgaagaaacggcagggattgtgccggagatcaagtggccgaatgacctgttaatcggcgaaaaaaaatgcgcagggatcctgacagagcttgaagcggacacagaccggatccaggctgtgattacagggatcgggatcaatgtaaacgaaaccgatttcccggaagccttaaaaccgatcgcaacatccctttcccttgcctcgggcaaaaaggtaaaacgcgcgctgctcgtccagcgcatccttgaaaaattggaaaaatacgaggaaatttatctcagggacggctttgcgccgcttaaaattttatgggaaagttatgccaatgtggcagggaaaaaaatcacggcgcatacgttaaaaggggatatttcagggcgtgcggtcggcatcacggatgacggcgtgctccagcttgaaggggaagacgggcagatgcatgccatttattccgcagatattgaaatcgaacgttaaaaaattgacaaaatttttggccggatatagcgcaatccggccattcctgttataatcaacttgggtagtatctatttcggaactataccatttcagctttttatacaaaatagattctgccttgatccttaaacggacggggacagagggccaaaatgaacaattgaaaaaacagggagcccgtctgtccagtgatgggctcctttttccaattgtttgtttcctctgcaccggtcaatccatgacaggtgaggagtgttggaaaatgaaacaaacgacggattttgtgaagatgaaggcgcaagaagaaaaaattgcaatggtgaccgcctacgattacccttctgcaaagcttgcagaagaagcgggcgtcgacatgattcttgtcggcgattcgctcggcatggtcgtgctcggctatgattcgaccattccggtgaccgtggcggatatggtccaccatacgaaagcggtcaagcgcggggcgaaaaacacctttgtcgtcaccgacttgccgtttatgtcttaccatttgagccgtgaagaaacattaaaaaacggcgcccgcattattcaggacggcggggcccatgccgtaaaactggaaggcgggaaagaagttgcggctcacattgaagcgcttacggaatcgggcatcccggtgatggctcatatcgggctgacgccgcaaaaggtcgggattttcggcggctataaagtccagggaaaaacagcggaagccgccaaaaagctgctggaagatgcgaaagcgtgcgaggaggccggcgctttcgccgtcgtcctggaatgcgtcccgcggcagctttcggaagaagtgacatccgccctttccattccaaccatcggaatcggggccgggcttggcgtagacgggcaggtgcttgtattccatgacctggtgaaatacggaagcgaaaaagtggcaaaatttgtgaagcaatttgccgatgcggatgccgtgatgcacagcgggctccgccaatatgtacaggaagtaaaaaaccgggcgttccctgaagaaaagcatacgtacacgatgaaagaagaagagctggcaacactgtacggggggcgtgcaaaatgaaaaccgcacaggcgatgagcgttgcagaaacgaagcgggaaatccggacgcttgtatcccggtataaaaaagaaggcaagtcgatcgggtttgtcccgacgatgggctatttgcatgaaggccatctcgccttggcaaagcaggcaagaaaagaaaacgatattgtcatcatgagcatttttgtaaacccgctccagttcgggccaaatgaagatttcgaccggtatccgcgcgatgcggaaggggaccggcataaagcggaagcagccggcgttgatgtattgtttatcccgtctgttaaagaaatgtatccgcgcgctttatcggttcaaataaaagtgacaaaggggacggatgtcctttgcggaagaaagcggccgggccattttgacggcgtggcggtagtcctttcaaaactgtttcacctcgtccagccggaccgcgcttatttcgggctgaaagatgcccagcaggtggccgttgttgaaaatcttgtccgcgatctggattttccggttgacattgtcccatgcccgattgtgcgcgaaccggacggccttgcaaaaagttcgagaaacgtctatttatcggaggcggagcggaaagaagcgaccgaaatatacaaaagtttgcaattggcaaacaaagcggttgaacagggagagagaaacccggaaaaagtgatttcccttgtgaaagcgcatctttccgcgcatctgtccgggaaaatcgattacgtggaattgtattcttatcctgaactcgaaccggtccatgccataaacgggcgctgtatcctcgcagtcgccgtccaatttgaaaaagcgcggctcatcgacaatatcatttttgcaggataaacaacaagaatagggagggattgctttgctacggactgtgatgaacggaaaaatccaccgggcaaccgtaacggaagcgaatttaaactatgtcggaagcatcacgattgatgcggatttgctggatgctgcgggaatggcgcccaatgagaaagtgcaaattgtgaacaattacaacggggcgcgatttgaaacgtacattatcccgggtgaaaggggatccggtgtcatctgcctgaacggcgcggccgcccggcttgcacaacccggtgacattgtgattatcatttcgtacgcccttttgacggaagaagaaatgaaaaaccaccatccgaaaattgtcctgcttgatgcaaaaaaccggattgaaaaaatgttatcggaagaaccggcttccacgattctgtagggggaaaaccgcacctgctttttcgggcagggcggtttttcaatttctgcagcctggttgtggcgaatcatcgattttatgttaaaatagtacaatatggaagaaacggggcaattatttttagtcaggtgatgttatgcagcgctatgtagtcgtagatcttgaaacaacaggaaattcagcaaaaaaaggcgatcgcatcatccagttttccgctgttgtggttgaaggccgggagatcaaaacgcaatttacaagcttcgtcaatcccgaaaagccggtaccgccgtttatttcggaattgaccgggatcgataacggcatgcttgaagaagcaccggtattttcggagatcgccccgcgcatcatggaaattttggaaggcagcatatttgtcgcccacaatgtgctgtttgacctgccgtttttgcagcaggaattaaaggctgcggggtttccgccgtttcgcgggccgagccttgacaccgttgaattttcgagaattgcatttccaactttaaacagttataaactgggggatctggccgattctttgtccctttatcatgaacggccgcaccgggcggacagtgatgcttttgttacggcaaagctgcttcttgcctgcatggaaaagtgtgcgtcccttcctgtcgtcacacttgaacaactcgtgccgctttcttattccttgaaaagcgaccttgccggcatttttgaggatatactggaagagaaacggcggcatatcgagcatttgccgccagatatggaagtataccggggcatcgcattaaagcggaaaagcctgcctgcggatgacggcccgcgcgagattggccgttatccgcaggatgcggctgaaaaagaatcctggtttgcggcttcaggcgccaggatggaagcgcgccctgcccaatttgaaatgatggaccatgtccgcgaagctttttctgccggcgagcatgtcgcattggaagcaggcacgggaatcggcaaatcccttgcctatcttgtgccggccgctttccaagcgatttcggaacaaaaaccggtgttaatcagcacgtatacggttgcgcttgagcaccagcttttaaataaggaaatcaaaaggcttgaacagatgctgaaaaccccggtcaggaccgtgttgctaaaggggagaagccattacctgcatttgtttaagtttgaacagtcgttaaaagaaccggaccggcagtacgacgccgtatttgccaaaatgcaaatcctggtctggcttaccggaacagaaagcggcgatcttgacgagcttcatttatccggcggcggaaaacatttttggcagcggattaaacaggacggctggcatacggataaaaaagatccgtggaaatcgcgggatttttatctccatgccaaagcctgcgcagcttctgctgacatcgccatcacgaaccatgcgatgctgtgcgcggaacttgaaagggaccagtcggtgtttgacggatttcaatacgtcatcattgatgaagcccaccgccttgaacaagcggcccgggaaacgatcgggaaacgcgcaagttacaaccaaatgaaatatatgatggcaaggctcggcctgtatgagcaaaaacagctgttttacaaattggaaaaaatgatggaaaaatacgggctaaaatccgggctgcatgcgtttgaatgcgatgcaatccttcaggggcttgatgccgagctcgatgatttattcggtttgctcgcccaaaaagtgatgcgcgcgaagcgggaaacaaacggttaccagaaaatcaaattaagaattaaaaaagaaaactggaaacaaaaagcatggcaggcggtcctgctctgtacggaacgggtcagggcgtccatgaaagagatttcgcaggcattggaagaaaggcttttgcagttgctttccgaaaaacagatgaaagaacagacactcgcttttatcgaagaaatgtacagctttttggaagattggcgccttttgcgcgagaacctggccgttttcgccggccaaaacggcggggatgaaaatgtcgtctgggtggaaggagatttgcgcgccctcccgaacagccttgtcatctattgccagccggtgcatgccggagaaacgttgcaaaaagcttttttttcgcaaaaaaagagtgtcgtgcttacttccgcgtcattgaccgttggcggaagcttccgctattttctgggcgagacggggctttcgcacaccacaaaaacagtccgcattccgtcgcctttccgctttgacaggcaggtgcagtttattatcccgaacgaccttcctgatatcggatccgccagtatggaagactttgcggaaaaaatggcaggttatctgcttgccgttgcggaggccacaaagggcaggatgatgattttatttacatcctttgatttgttgaaaaaggtgtaccacctgatgaaagaaagcggaatgcttgaagattatatgctcatcgcccagggcatatcaagcggcagccggtcgaggttaacgaaaagctttcaaaaatttgacaaagcgatccttctcggtttaagcagtttttgggaaggggttgacatccctggcgatgacctttcctgcctcgtgatggcccgcctcccgtttttgcccccggatgagccggttatagaagcaaagtccgattatttcagggcaaaagggaaaaatccgttttccgcttatgcgttgcccgaagccgtgctcaggttcaaacaagggtttggcaggcttatccggacgcgccatgaccgcggcatttttcttgtcctggaccggaggattgaaacggccacatacgggccggcgttcataaaatcgctgccgccggtccgcatcaggcacctggatctgaacgggacgcttgaggccattgaaagctggctgtaaaaaaagtgctgcgacaatgcagcacaaaacagggtggaccggaaaaatgatcaaatgcatcattttttcattcatttttgctgtataatgatgaaggaaatgattctaagcttaggatggcctgcatgggaactgatatgaatgacaatatctgcttaaaaggatttacgccatggaaaatgagggttcggaatgaaaaaagcactgatctcaatttgcattttggtcatcgtgatagccggatttgcggcagagacttattggaaagcacggaaaccgtatcatgaagcatacaacaaagcggccgctgttgccaaaagcaaagccggcatccgggctgccgatgcattttatctttacaatggcacaagcacctattatgttgtcgtggggaaaggaaaaggcgggaagaaaaaagtgatttggatccctgaaaagaaaccgaaacgtgtgaccgtcctagacttgaataccggcatctcaaaacaggatgcagtgaaacaagtggtgcaaaaaaggcagccggataaaattttatctgtgcggctcggcatggaaagccaggttcccatttgggaagttgcttatataaaaggaaacagcctcggctatgatgaggttccttttttaaaaaaatccaattgatccgtttggagaggtgaatcgtatgaaactggcatcaagggtaagtgcattaacgccgtcatccacgttggcgattacggcaaaggcaaaagcaatgaaggcgcaaggcatcgatgtgatcggccttggcgcaggtgaacccgattttaatacaccgagggagattatcgaagccgcgtatcagtcgatgctggacggccagacgaagtataccccggctggcggaatggcatcgctgaaagaggccgtcattgaaaaattccaaaaagaccaggggcttggctttaaagcaaatgaaatcatcatcaccaacggggcaaaacacgccttgtatacattgtttcaggtgctgctcgaccagggcgatgaagtgatcatcccgtctccttactgggtaagctatcccgagcaggtaaagcttgcggaaggcgtcccggtctttgtagaaggcaaagaagaaaaccagtataaaataacgccggagcagctggaaaaagccgtatcaccacggacaaaagcgtttgtactcaactctcccggcaatccgaccggcatgatgtatacaagggaagaacttgaaaaactcggcgaagtctgcctgaaacacgatattttgatcgtgtcggacgaaatttacgaaaaattggtgtacggcggcaaccggcatgtctcgatcgccaccatttcaccggaactgaaagcacagacggtgatcattaacggcgtctcaaaatcccattccatgaccggctggcggatcggctatgcggccggaaacggggaaatcattaaagcgatgacaaatcttgccagccattcgacttccaatccggcaacgccttcccagttcgcggcactcgccgcatacagcggggaccagcgcaccgtggaagagatgcgccaggctttcgaggcacggctcaatgcagtttttaaccagctggttgaaattgacgggattacctgcatcaaaccgcaaggcgctttttatttattcccgaatgtgaagaaagccgcaaagctgaccggttttcaaacggttgacgcatttgcggaggctttgctcgaggaagcgcgcgttgccgttgtcccgggttccggtttcggcgcggaaaacaatatccggctttcttatgccacttctttggaaaatcttgaagaagcgcttaagcggatcaaacagttcgtggaaacacggaaaaaagcatgaacctttggcttgtttcctttttccgcctttgtttagtataatggattccggtacatatgggagacaagccggaaattgttttggagggaaataccgtgaaaatcaccatttcagaagtacaccagcatatcggggaggaagtgacgatcggggtctggctgaacaataaacgttcaagcggcaagattgcctttctcgagctgcgtgacgggacaggctttatacaaggcgtggtcgtaaagaacgaagccggggaagaggtctttcaaacggcaaaatcgatgagccaggaaacttctttctacgttaccggcaccgtccgggaagatgcccgctccccgttcggctacgagctccaggtggccggcattcagatcatccatgaagccgtagattacccgatcacaccgaaagcacacgggaccgaatttttaatggaccacaggcatttatggctccgttcccgccgccagcacgctgtcatgaaaatccggaacgaaatcatccgggcgacgtatgaatttttcaatatgaacggatttacgaaaatcgacccgccgattttaaccggcagtgcgccggaagggacgaccgagctgttccatacgaagtactttgatgaagaagcttatctttcgcaaagcgggcagctttacatggaagcggcagcgatggcattcggaaaagtattctctttcggcccaacgttccgcgctgaaaaatcgaaaacgcgccgccatttgatcgagttttggatgatcgagccggaaatggctttttatgaacatgaagacagcctgaaagtgcaggaacagtatgtttcctatatcgtccggtccgttttggaaaactgcaaactcgacctacaccggcttggccgcgatacttcaaggcttgaacaagtgtcggcaccgtttccgcggattacgtatgatgacgccattgaattgctccatgaaaaaggatttgaggatatcaagtggggtgaagattttggcgcgccgcatgaaaccgcaattgccgaaagtttcgacaagccggtgttcattacgcattatccggctgcaattaaaccgttttacatgcagccggatgctaagcgcccggaagtcgtgctgtgcgccgatttgattgcgccagaagggtacggagaaatcatcggcggcagcgagcggatcaatgactatgatttgttgctgaaacggatcaaggatttcaatctgtcggaagaagcttacaaatggtatcttgatttacgtaaatacggttctgttccgcattccggcttcgggctgggccttgagcggacggttgcctggatttcgggcgttgagcatgtgcgcgaaacgattccattcccgaggcttttaaaccggatctatccgtaattgaaaaaacggctgcattgacggtgtgcagccgtttttcttttcagatgtttttttcaattcccttgccgtttttaaactgctatacttacattgaggtgtccgacatggataaagatcttttgcttgcctggtgggaagaaggggtattgaccgtcccccagctcttattgaaaaaatacaaacagcttggcctgaatgaaacggaacttgtgcttttgctgcaagtttattcttttttaaaagagggaaatgcgtttccgacgcctgaagatctggcagacaggcttaccattccggaaagtatgtgcgtttcgattttgcggcgtctaatccagcatcagtttttgtccattgaagaaggggaaggggaaggcggcatcctgtatgaaaaatattcgatcatgccgctgtgggcgaaactcgccgatgaatttatctatgagaaaaaacaggacgagcttgaaaaaagcgtaaatgaagaaaccgatttatacaccacgtttgaacaggagtttggcaggccgctgtcgccgctcgaatgcgaaacattggcgatgtggattgaccaggacgggcaatcctctgatttgattaaagccgccctgcgtgaagccgttatctccggcaaactgaatttccgctacatagaccgcattttgtttgaatggaaaaagaacggcatccggacggtggatgaagcacgcgaatatggaaggaatttccgcaaatcgtcaaaaccgcaagcagaaaaaccgaaaacgaccaatccggtgccgttttataactggcttgaacaataaaaggtgacgataataattttatgtaaactagttacgggagtttgagagatgctgacaaaacaacaaatccggcattgccttgagacaatgggggaaatgtttccggatgcccgctgtgaattgaatcattcaaatccttttgagctgctgatcgcggtaacattatccgcccagtgcaccgatgcgctcgtcaataaagtgacaaaaaatctgtttcaaaagtataaatccccggatgactatattgccgtgccgcttgaagaactgcagcaggacatccggtcgatcgggctttaccgcaacaaagcaaaaaacatccaaaaactttgccggatgctcatcgaggaatacgggcgggaagtgccgcaaacgcgggaagaactgatgaaactgcccggcgtcggcagaaaaacggcaaacgttgtcctgtcggttgcttttggcattccggccattgctgtcgatacccatgtagagagagtaagcaaacggctcggattttgccgctacaaagacagtgtactggaagtggaacaaactttaatgaaaaaagtgccgaaagaagaatggtcgatcacgcaccactggatgatcttcttcggccgctaccattgcaaggcccagcgcccgcaatgtgaaatctgcccgcttcttgacctgtgcagggaaggaaagaaacggatgaaatggaaagagaacaagaaataacaatacaaaaagcatggagaactgattctccatgcttttttggtgtgaaccggcgggagcacaggaagcgatcaatcacgtgcttttttattcagaaccggtatctttatttgcgggcgtgctgcccgaactgttgtcgcctttattagaattgttcccgccgttcgtattggttcccttggttccgtttgaaccgctgctaccgtttccattcgtgcctgttccgttgtttgccgggctgccgtttccgcttgaagtgccagtgcctgaactgtttcccggactgttgttgttatctttgctgccgtttccgtttgaatttccgctgtttgttcccttgtctgagccggtgttgtctttgttttcgccggactgattggtgtcagtaccggggttattgtttgcatccggttgtttttgggcattgtcttccggttgcttgttttggttatcatccgccttcgtgtccgtgctgccccccggaaccgttacactcgtggatgccgctttgcttttcacgccatttaccgtggcggtgacattgaagacatacgttgcgcccgctttcggatttgcgacggtgatcgattttcctgaagtcgaaccgaatgacgccgcgctgccgtttattgtaccggatacgttaaaggtcgcatctgaccctttataatcccaggttaccgtaattttattgctgtctgcatcatacgctgcgtgaacatttgccggcgcatcttgggtgacggattttttatcaatcgccgtatcgatatgaccgcggatatacaattcgctgcctattctgacgacacttttcggcatcgtaaagtcaggggtttcttttccttccgatacataccgcatcaagtggcggtaaatttgctgcgcaaccgtttgatacggccttgtgacgccgtattttttgcctttctcactttcgtagccggtccatactgctaacgaatatcttgtcgtgtagcctgcaaaccaggaatcctgtacggacgaactcagaatcccgtattttgccagatcgtttttatcaaaattcgtggtgcctgttttaccggcggcaggcaatcccggaatatgggcggttatcccggtgccctttgtcagcacatccttcagcacgtccgtgatcatataagccgtatagtcgctcatggcgattttggactggacatgcggtttgatttccgtgacgccgtcgcgcaggacaatttttcggatggcatgcggcttgttgtatatgccttcattgccgaatgcggcgtaagcggaagccatctgcagcggtgaaacttgcacccctccgccgatggatgaagattcaacgatgtctttgctgtttaaattaaggccgagtttttttgcaaaacggatggccctttccttgccgacttctttatatgtttcataggcaggaatattccgtgataaatacagtgccttgcgcatgctcatcttgccaaggaaccggttatcccagtcattaatcggcgttccgtctgaataagtggttgccacatcgttcaattggtgcccggttgaccagtgcaagtattcaatcgccggcccgtagtcaagaatcggtttgattgttgatcctggcgaacgcttcgtatcaacggcatagttgaagccacggtcaagtttcatattgcgcccgccgccgagcgcacggatttcgcctgttttcgtatcgatcagggcaatgccggcctgcatttttttatccggataattgatgatcgaattggtgtttaagatcttttccgtatattgctgtgcggaagaatccagggttgtataaatggttaaaccgtcggcatatacattatagttcccgagtctctgcacttccttaatcacttcattgacaaaagcaggatatttgttcgcgttagtattccgctctttttctttcaccagcccggccgaaaccggggcggcctgcgctttttccatttcatcctttgttattttgtggtttttgtacatcatataaaggacaatatctcttcttttctttgtcagatccggatggtcaaacggattataattattcgggctttgcggcatgccggccagcacggcaatttccggcagtgataatttgcttaaagatttgccataataatgttcagcagctgtctcaaagccgaaaacaccgtctgacatatagactttattgacatacatttcaaggatctcatgttttgtgtatttccgctcaagctgaatcgcaagccatgcttcctgggctttccgctttaatgttttttcgtttttattgttcagcgccatggaaacgacctgctgcgtcagggtgctggccccctcggacccgaaacctttggtaaagtttgcgaccaccgcgcccccgagccgtatcgggtcgatcccgtgatgctggtagaaccgtgcatcttccgtcgaaagaatcgcgttttccatctgctttggaagctcttcataatcgatatatttccggttctgtgccccgagcgttgcgactgttttgttgcttttatccttgatcaccgatggaatcgggtcggataactgcttcttcgtcagtttcggggagctgcttgcgtaatacgcaaaagtgctgatgcccgcaatgaccccggctagcccgagaataaagcagacgagaatgagccgctttataaatgttaaaaatttgtttttcggttttttccttttctttttatgttgatttgcctgcatttgtttccggcgttcttcgcgggattggtatttttctgccatgctcagcattcctttcttctaaacctgaaaaagccgatttagattcaaaacatattgttgccggatccgtcaatcatccggccgggcaacaactataaagcatataattgctttaaaatggcgatgtaatcaattctcggccggtatccgaccggtataggatgcccgtttgcttcaatttcttctttttttatcgattttctccctccggcaagcattctatcccaataaaaaaatagatggcgggattccagcaaaaaaatttcttctcccttcgcaaaacggagaatgacaaagcaaattccgccttgcgctaccacctgtttcatatgggtgatttgatgctcatggaagttatgaagcggaaaagaagtatggttttgcgtttcctttgcttcaaagtctatatatttaccgttcatcaccccattgtaatcggttgtggacggctgtttaaaataggcttctttaatgacggctgtgctccgtgaccggtaatcgacctggacaatctggatcggggtcggttttttatggataacggcaatgccttcctgcaaataataagcattggtttcattcagatcctcttccagtgtcatcccccggttgccgtataaaatttggttcgcatttttccgtccggctttgtttttttcccctttatacctttttccgtttggataacgcaattccatgttccctcacctcataagctaaattatatcatagcagaacagacaaagaatatgtaataaaaaaaacagtctttcggcccctttgcaccggcggaggacaaggaaccggcctgcccggcttttttcgctaaaaacaggcaaaacaaaaagcaaggaaatgttaaaaagcaaggaaatgtttccttgctttttgctttcattaggtggaagggcggtcagggccgttcagcttcttatctcctttcgccaaagaccctttttgttcctgtgcttttttttgttgttgcgctttgttatcattcgttttcatggaaatccgcctcctgaaattggtgtcaccggattttccggcatatttattgtttgcagttccgccttttgcatacatgccggcacgaaagttgacgcagccagaaaaaatgtgcccgaaatggagacatgctgtcgaaaggaaacacaaaatgaagaaacccgttttctttgccgaattgcttctagttttgtcagacatgaagggaccgggccgcctggcagagaatgaataggcatgatgaaattcaggggggaagcacatgataccgaaagccgcatttttaaacgggctggaaaaaatggaacaggcgctggaaaacatcgggacggggatccggcataaggcggaggaggaagcaagaaagcagtcgataaagcagtggtaccgtttaaaaaaaacagaaatgaggctggaccatttggaaaaaagggcggaagcattcagaaaaacatacagggcggaaagcttgcggattgatgaaaacaaaaaaacttcctaaaatgaaagaagtctcccgtgaagaacccggcaaagggagaatatccggttagaaaggtgaacaaaaatggaagacggacaattacaagcgttaaaccggcagctgatttcgtacacgcatgagctttatgacctgtaccaggaagtaaaggcaacaggggtggaaaaggattttttcagtgaagtcaagcctttttgcgatacgttgcaggatgccattgacaggtggctcccggctgcaaaagcatgggtggaagcccggaggccggcgcatctttttccatcccagcttgaacatacggccgaaaatttgcaaatggttgcggtgcgtgctttttacccgtcatccagccgcaaaatgatgctcgatcatttccagtcagtaaaatatattctccaatgcttgcaggaagcattggagaaatcgtaatcgatagggacatatcaccaattgtcggatgccacatacattattggtgaagcaggcaggaggcgatggcaatgcgcgtttttcaagatccttacagcagccggcgcacaagcagcacaggccggtatcctgcaatgccgggggccggtccgtattacccgcagtttccatatcccgggcaacattccccgcatgtgttcggataccccccggcgccgtatccatacggccagcaaacgagcgggtatggccatgcctggcatatgcacggacaaagtggccagcatgccggggaagaagcggccatgcatttgttcgggaacccgctggaggccgctgaaaagccaaacacccagcacgatgcggcagggttcgcccatccgtacccgcatcagcctgttccgctaaagccgccgcaaatggggggatcttttttgaattccttcaaatcccaggatggctccatcgattttaataaaatggtgaatactgccggacagatgatcaatgcgattaatcaagtgtcatcgatgatcaaggggctcgggggcctgtttacaaaataggcttccgggccgttttgcttaaaaagggcgaaaaacggaaaaaaccgggacgctcccggcatactattcaatcctcagcttttttttctttcctttcggcatgaaaatcacaagcagcccgttttcaaattttgcctgaatctgatccccgtccaccgcgggcggcaggggcaccgtccggcttatccggtggaatgcgcttttcttttcgtaagcttttttcgtttcatccaaacttgaaatggcttccttatgcctggcgttaatggtgagatattgatcataaacttcaatctcaatctggcctttttcatagccgggcagtttggctgtcaatacataggcctcatctttttcttcgaggcgtaccggaatcgtatcaaaagaaaaaaattcatccagattctcaaaaaaatgtttgaccggcttttcctgaaaaaattggtccatcgcatgcatcagcccgtaaaaagggtgtttttcgtccggaccggataaattggacatcgggcaggctcctttcttgttgatgatgaagaaaatgaaatggttgcacaggactctttcgctgtataatatgaaaaccaagcggaaaatgtgaaagaatgctttgaaaacgaacgtctattcgctataatagatagcggggtgaggaaagttgttcaaaaaaaagaatttgcaggaaatattggcgcaattgcggatggaccgttctttccaggagcggatcgtccattggcatacgattgaaggaaagccggctgtaacggtgccttttcctggcagcatcacaccggctgtactttcggcgctggaaaaaagagggatttcgtcattgtatacccaccaggcagaggcatatcagcttgccatggcaggaaaagattttacggccgttaccccgactgcatcaggcaaaacgctttgctataatctacccgtgctcgagaccatccttcaaaacccggatgcacgcgcgctttatatgttcccgacaaaagcgctcgcgcaggaccagaaaagtgaaataaacgaaatgattgaagaagccggcgtacctgtaaacagttatacatatgacggggatacgccttcaaatatccggcagcgcgtgcgcaaagccggccatatcgtcatcaccaatccggatatgctgcattccgccattttgccccaccatacaaaatgggtgtcgttttttgaaaatctaagattcgtggtgatcgacgaactgcatatataccgcggcgtgttcggcagccatgttgccaatgtgttgcgcagattaaagcggatttgccgttattacgggagcgatccggtttttatttgcacgtccgcgacgattcaaaacccgaaagagctggcggaaaagctaaccggcaaaaaaatggaactgattgaccaaaacggcgcgccgagcggaacgaagcattttcttttttacaacccgccgcttgtgaacaagccgctgaacatccggagaagcgccacacttgaagtccggaaaattgcaggggaacttttgaaaaacaaaattcagacgattgtttttgcaagaagccgtgtgcgcgtcgaaatcatcttaaaatacttgcaggaaatcgttaaagacgaactcggggaaaagtcgatcatgggctacaggggaggataccttccaaccgagcggcggaaaatcgagcaggggttaagaaacggggacatatacgggattgtcagcacgaacgccctcgagctcggtgtcgatatcggccagctccaggtctgtattatgaccggctatccgggcacgattgcgagcgcctggcagcaggccgggcgcgcaggaagaaggcagggggaatcgcttgtcatccttgttgccggctcaagcccgcttgaccagtacatcatccgcaatccgggcttctttttcaaccggtccccggagacggcgcgcatcaaccccgataatcttgtcattttagtggaccatgtcaaatgcgcggcatacgaactgccgtttaaaaaaggggaaacgtttggcggcgttgaaatcgaggacgtgctcgagtttttggcggatgaacggattctccaccgccgcggggatgcgtggtactggatgaatgatgcttttccggcccataatatcagccttcgttccgcatcgcaggaaaatgtcgtcattatcgatacaacccatgcgccggatgtgcgcgtgatcggtgaaatggaccagttcagcgcgatgacattgctccatgaagaggcgatttatttgcatcaggcggtgcagtatcaggttgaaaagctggactgggaagagaaaaaagcctttgtccgtgaagtcgctgttgattattacacggatgccaatctggcggtggagctgaaagtgctggaacaggaccgagagaccgttttgcaagatgccaaaatcggctatggggatgtgatggtccgggcgatgccgacgattttcaaaaaaattaaatttaacacgcatgaaaacattggctcggggccgatccaccttccggaaatggaactgcacacaaatgccgtttggttttccatgggggaagatgcggtgccaaaacatttgctggagggggcgcttgccggtgctgcgcacgcactccagtcgattgcgccgctttttgccatgtgtgatgcccatgatatccaggctgtgccccaggtgaaagcaatccatgacgaaaagccgacaatctttttgtatgaccggtatccgggcggcatcggcctgagtgaaaaaatctatggcggggcaaggaaaattttggaatctgcaagagcgatggttgtaaactgcccttgcgaagacggatgcccttcctgtacaggcgcggaaacggctgccgcgggcgcaaaacaggccgccgtccggctgtttgatttctggctcggggcgatcaaaggaggaaggcatcatgccgggattaaaagataaattaaaccggatgaaaaaccatatcgtgagggaccagccggagcctggcgaacgggcggaagcatcccgggccgattctgtccctttctttgaaatgtgggaaaaggcgggcgtctcgctgtatgatttggatggcgattactgcctgatccgtgaagtccgctacccgcttgaaacaaagcacggcaaatatgcttttcgcgactattttgacgccatcaaactgtggcagcaaaagccggtccgccaccctttatccgccaaagggtacagcccgtctgatttattttttttcgataccgaaacgaccggcctcgggggaggggcgggcaacacgatttttttgctcggatacgcttcctttaccgaagaaaatgtcattttaaaacagcatattcttccggagccggggcttgaagtgccgctttactacagcttcctggaaaatatcgattacactgcgctcgttacttataacgggaaggcgtttgactggccccaggtgaagacgcgccatacgctgatccgcgaccacgtgccgcgtctacctgaatttggccattttgatttgtaccacgcggcaaaaaggctgtggaaagatgaactcgggtccgtgaaattagcgaatgtggagcgcgaaattctgggagtggaacgcgaagaggatattccgggatacctggcgccgatgatttattttgatttcgttgagcgcaaaaatccggaaggcctgcttggcgtcatccgccataacgaagaggacattttatcgctcatttctttgtacacccaccttacgtttcaaattctagaggccgacccggaccagacggcaaaggaaaaacggcttgtcgggaaatggtttgaatatatcggcgaagatgatgctgcggtgaaaagttttgaagcggccgccggcgagaatgatctggctgccaaacaccgcctggccttccagtataaaaaacaaaaagcatacagaaaagccggaatgctctgggcggaattagccgaaaaagcgccggatacgataagagccgaagcatgcattgagctctccaaactgtatgaacacaaggaaaaagaccttttgcaagccgtccgctatgccgaaaaaggcctggaaatttatcaaaagtacggcagattcggttatgggaaatggaaaaaatgctgtttggaaacggaaaaacgccttttacggctgtaccggaaagcccaaatcccggcgagatcctctttcagcaaggaaatgcccgggaaaagaaccggtttttaaccgctatttcctgggcaagcgcatgattcgacgaggagtccgggattttggaacgccccttgttgggatttgtcggtttcttttggatcagagaaaaatgcgcgccctttgtcgattttcgtatgttgtgattgtagcccgccaaaagccccgttaaaataggtgttgattaaaaggaaatgtaaagaggccgggaaaacgggcttcgggccgctccctgcattgggaggcgtggagtgaaataaagaaatgcaaattgggttttttcattagtacatgttccctttccgagtcataggttagtagtgtaagaaaaaagacgtctgatgatgaaaggagatcggaacatgtttcaccaccattgcccgccgcggatcatgccggctgttgtgcatccgacaaaatgctgcgttacgcacaccgtccaggatgtcatcgtgccgcatgttttcccgacgcatacaacccatgtgaatcaccatgtatttcatcagcaaaactactttccgcacacggaatcgtatgtcaatcaaaccgatccgggaacggtctgcaacttttttgatccagtcaggccgcacgggccgaagtgctgctgacaaatggacggcaagggcaatccttgccgtcctgcttttaggaaaacaaaaggagcgtaatccattggaaaaagttgtcgccattacaggctataaaccgtatgaactggggatattcgggacggaccacccgggtattcgctatattcaaacggcaatcagaagacggttgctggaattgctcgatgaagggtacgaatgggtccttatttccgggcagcagggcaccgaactttgggccgctgaaaccgtttttgatctgcaagcggaatatccggaactgaaactcgctgtgttaatgccttttgaagggcaggaagaaaagtggaaagacgaacaaaaagaatactacgaaatggtgctttcccaagccgattttgttgccgccatctcgaaaaggccgtatgaaagcccgcagcagttccgcaataaaaaccggattttcttacataaaagcgactgcctgatgattgtgtatgatgaagaacgcgaagggtccccgaaatatttgttcgaagctgcaaaaaagttcagcgaatcgcattcgtatgacatccgcatcattgacttttacgatttacaggcaataatagaagaagaacagacagatttttaggcagctgtggtacagttgacaaataaaaaggtttttgaaaaaatgaaattatgtctgggagatgtaaggtggtgcaaacatgttatcggatcaaattaaattgacggcgaaagacattttggaaaaagagtttaaaacggctgtcagaggctaccggcaggaagaagtagacaaatttctggatctgatcataaaagattatgaaacgtttaatcagacgattgaggagctccagcaggaaaacctccggctcaaaaagcaggcggaagaactgacaaaacggcagcctgtacagcaaatgaccgggacaacgaatttcgatattttaaaacggctgtccaatcttgaaaaacatgttttcggcaacaaattaaatgaatagccagctcaaaaaatgtgtgaaatttttctgcggaaagggcccggggaagcggcataaataaacagaccatcgcttgcccgaacccggtatggcaatacagggggaagaaattggcacaaccgttaaaaattacagcttgcaagtcccggtttctttttatataatagataagcgttgtgaataacgttcgggtaatcgctgcagcctggaaacggctgttgaggaaagtccatgctcgcacggtgctgagatgcccgtagtgtttgtgcctggcgaattcataagccagggcagccttggttcaaggctgacggcagggaaaacgcctaaaccttcaggcaatggcggagtacccttgaaagtgccacagtgacggagctttacgggaaaccgtaaaggtggaacgaggtaaaccccgcaagcgagcaactcaaatcatggtagaggcactctttctgaggaaatgaacgaggaaagagacaagcgtattgcttgtagatagatgattaccgccttcgtacgagatggcgccacatcgtttgcagtacaaaggtacagaacatggcttacagaacgttattctggctgaatcgaaagaatcgggccggcgctgcggtatttagatatacagcaggcgcccggccttttttatacataattttttaaaacggggttatccggtactgaatgccgcacaataagaaatataagatgagagatggtgggaaaatgtctggctttcaattgatcgcgacaagcgcaatggggattgaggcgcttgttgcaaaagaagtacgttcactcggctacgactgtacggtggaaaacgggaaaattgaatttgtcggggatgaatcggcgattgcccgtgccaatctctggctgagatgcgcggaccgcgtgaaaatcaaagctgccgaatttaaggcggaaactttcgacgaactgtttgaagggacaaaagcggttccctgggaggattatctgccgagcgatgccgagtttcccgtcaccggaaaatcggtcaagtcaaagctgttcagcgtcccggactgccagggaattgtcaaaaaagcaatcgttgaacggctgaagtcccgttataaaggaacgagctggtttgaggaaaacggcccgctttttaaaatagaagtggcgttattgaaagacgtggccaccattacgatcgatacaagcggggccgggctgcataaacgcggctaccgcgcggcgcaagggccggcgccgatcaaagaaacgcttgccgctgcgcttatccggctgacaaactggcatccggaccggccgtttcgcgatccgttttccggttccggcacaattccgatcgaagctgcgctcatcgggcaaaatattgcaccgggttttaaccgcgattttctatgcgaaacatggccgtggatgagtgaagccgtctttgaaaaagcgcgcgaagaagcagaagatctcgcccggtacgaccagccgcttgacatcgccggttcggatatcgaccccgggatggttgaaatcgcccggcaaaacgccaatgaggcagggcttggcggcatcgtcacgtttaaacagatgcaggtggccgattttacggcgcaggaagcatacggcacgattgtgggcaatccgccgtacggcgagagaatcggcgaacgggcggaagtggaaaacatgtacagggagatgggccgtgcatttgccaggcttgacacgtggtcggtttatattttgactgcggacgaacagtttgaacgcgcatacggcaaaaaagcgacgaaaaaaagaaagctttacaacgggccgatcaaaaccgatctgtatcagttttgggggccgcgcccgccgcggaaaacggaaacgtaagcaaacggaatggttatcgtttgtgcgctgcgtgaaacatggtaagatggacgtgcaagtgatttgacgggaggtatgatgatgggaacagagccgattgaaaaactggagcaggactttttggcgtatgtcaaaaaaatcaaagcttatgaagaagcacttgcccttatatactgggatttgcggaccggcgcgccgaaaaaaggcgtcgggcagcgtgcggaagtgatcggcattttatcgggcgaagtctttgacatgcaaacttcaaaagaaatggctgaatttttggagaagcttttgccgcatcagcagcaattgtcggaacggacagctggtacattggaagaatgccggaaaacatacgaacgcagcaaaaaaatcccgcctaacgaataccaggcttatacggtgctcgtctcgaaagcggagaatgtttgggaagaagcaaaggaaaaggcagatttttccttgttccagccatatctcgaacaaatcgtggaatttaaaaagaaatttgtccgctactgggggtacgaaggccatccgtataatcccctgctcgatctgtatgaaccgggcatgacagttgatgtgctcgaccgtgtgttcaaacaagtgaaggatgcgattgtgccgcttgtccagaaaatcagtatgtcggaagaaaaaccggatacggcattcctttttcacccgttcccgaaagaaaagcaaaaagcgtttacgcttgaaatactcaagcagatgggctttgactttgaggcggggcggctggatgaaacggtgcatccgtttgcaaccggcatcaaccagggggatgtgcggataacgacacgttataatgaaaacgactggcgtgtcgatgtgttcggcgtcatgcatgaaggcgggcacgctttgtatgagcagcatatttcaaaagacctgtcgggtacaccgcttgcagaaggcgcgtcaatggggatacacgaatcacagtccctgttttttgaaaacatcatcggccgttcttttccgttctggaagaaaaattattcgctcttgaaacaatttgcatccgggcagtttgatgatgtgccgcttgaaacattttatcgtgcagtgaacgaggcgaaaccgtccctgatccgaattgaagccgatatgctgacgtatccgcttcatattatggtgcggtatgaaattgaaaaagcgcttctcaatgatgaaatcgaagtcggggaactcccggaaatctggaatgcgaaatacgaggactatcttggcatccggccggaacatgacggggaaggcgtactccaggatgtgcattgggccggcggggatttcggctattttccgtcttatgcgctcggcctgatgtacgccgcccagttcaaacatgcgatgttaaaatcgctcccggattttgacaagcttgtggaatcgggcaatctggagccaatccggaaatggctctcagcgcatgtccaccggttcggcaaattaaaaaaacctgccgatattttgcgcgatgccactggcgaagcgctcaacccgaaatacttgattgattatttaaccgaaaaatataccggtgtataccggatcaaagattaagataaaacttccggctaacaaacaaagtgttgcagccgccggtttcagaaagaaaaccggaaacttgcgtatgccgcttatccggtgtgcgtaccctaacaggcaattgattgaacgatgaaaaaaacggcggatattccggtttttctttccatgttgtcctccgaattgcctgttaaaaattccgtaggatgtgacttgcgttttgccaaaacgcgaataaaaagaaagatggaaaatccgccgttcggaaatttcgtctttacatgacggaaagataccattatacttttattataaaactgaacgcattcactcatataatcgcgggaatatggcccgcaagtttctaccaggctgccgtaaacggtctgactatgggtgggcaatgggaacgtggcagatggttccttttcctttttgcacatgaaaaagctcaaaggcgttgcttactcctttttttgtgggtgcagcggcctttgggctttttttctaaaggccgcatgtttcaatcaagacaaatgcagcgaagggaaagaggaggaaaaacattgaaagctttacaagaaaaaatcagaaaagacggcatcgtgctttcagaccaggtgctgaaagtggacgcttttttaaatcaccaggtcgaccctgtcctcatgaaacagatcggggaaacatttgccgggctgtttaagcaggatggcgtaaccaaaattttgacgctcgaatcttccggcatttcgcccgcattaatggcagcactggaattaaacgttccgatgatttttgcccggaaaagaaaaccattcacgcaggacgcggacgtatatgaagcttccgtccattcatttacaaaacaaacaacccataccatttccgtttcgcgcgcttttttaaatcagggtgaccgggtgcttgttattgatgattttctcgcaaacggccaggcggctgaaggcctgattgatattatcgaccaggcaggggcggaactttgcggtatcggcattgtgattgaaaaagcattccagccgggcggaaaaaggctgcgcggacgcggaatccgcgtggagtcgctcgcatcgatccggtcgcttgaaaacggcacggtcagctttcaagaggaggcgtatgcgaaatgaaaccgggaaaaaccaaaatgaccgtactggcgatccagcacgttttggcgatgtatgcgggcgcagtcattgtgccgattattaccggcagttccctggggatgaacagcaggcagctgacgtacctcgtttccattgatattttcatgtccggccttgcgacactgctgcaaatttggaaaaaccggtttttcggcatcgggcttccaattatgctcggctgcacatttaccgcggtcgggccgatgatcgcaatcggcaagcagtacggcgtttcagctgtgtacggcgccattctcgtatcagggctgtttgtcattttgatcagcaaatttttcagcaagctggcccgctttttcccgccggttgtgaccgggtcggttgtcacgattatcggcgtgacgctcatcccggttgccatgaaagatatggcgggcggagacgggagcaaagatttcggctccctggccaatatcgccctttcattcggcactttgctcatcattgtcctcttgcagcggtttgcaaaagggtttatccgttcgatctcgattttaatcgggctggcactcggcaccgtggcggctgcactgctcggaaaggtcagctttgccccggttgcggaagcctcatgggtgcatatcgtgcagccgttttatttcggcgcgccgacttttgagtggagcgcttgtatcacgatgatccttgtggcgctcgtcagtcttgtggaatcttccggcgtctacttcgctttaagcgggatcaccaaacagccgctccatgaagatgaccttgcgaggggctaccgggctgaaggccttgccgttatgcttggcggattatttaatgctttcccgtacaccgctttttctcaaaacgtcggccttatccagctgtctggcgtgaaatcgaaaaacgtgatggcgcttgccggaacctttttgctccttttcgggctgattccgaaattaggcgccctgacgacgatcattccgtcttccgtactcggcggggcgatgattgcgatgttcgggatggtcattgcgtcaggcataaaaatgctgagcaaagtcgattttgccaataacgaaaacttgtttatcattgcctgttcaatcggcatcggccttggcgtcacggtggtgccggatattttcaagggtttgccgtcgaatatccagcttcttacgcaaagcggcattgtcgcaggcagtgtgacggccattgtgctcaatctttttttccatatccttccgaataaacaggaggcaaaagcaaaagtaaaaaaagtcgggacacaggcatcctgaccggatgaaaaaagctgggccggattccggtccagcttttttcggattaatttaaattgccggtattgatgaccggctgtgcggcccggtcggatacaatcgaaaccatcagattgttgatcataaccatcttccgctcttcatccagttcaaagccgtctttttccaattgcgcaatcgccatctgtgccatgccgactgccccctccacgatttttttccgggcggcaagaatggcggaagcctgctggcgctgcagcatgacgccggcaatttctgtagagtaggcaaggtgcgtgaggcgcgcttccataatttccacgccggcaacatcaaggcgcggctggagttcctcttttaaatgcttggaaacttcctccccgtttccgcgcagcgaaatcccttctgcctccgcgctgtcataagggtattttgtggcgacatggcggagcgccgtttcgctttggatctcaacaaattcttcgtagtcctccacattaaacacggctttcgcagcatcgaccacacggaatacgatcactgcggcaatttcaatcggatttccgtccacgtcattcacttttaatttggcgctgttaaaattccttacccgcaacgaaacgcgccgccttacactgagcggaaccgttacgtaaaagccgctttcccggatggcgcctatatagcggccgaaaaaagtgacaaccaacgcctggttcggctggattacacaaattcccgagacaagcaggacgcttatggcaagcaggacaataccggcaaaaaaattgacggcaaaaaggaaaaacaaacctagaacagcgaaaacggcaatcgctaaaataccgagaaaaccgtttatgtgccaggctttcttttcggacatctcttccccacctcttttattttctcttcacttcatcataacatgccggcatattgctgtcacgctgagggagagaaatcccgtgcattttagcaaagcaaaagccgccaaagtgtagcggctactgccggtttgactgccattcctgaaaggagcccgttccgttgcacccggaacagtcaaacggataagcgtattcgtatgcggccggcatgataaaaccgcgcacggcgcaatccgggcatttgttttgttcctgcatcgcggacaagtatttttcgcgtcgtgcggactgccaggcagaaagggaacggaataatcccatctgctttcacctcctgatacagccatatgatgggtttctttccggaaaattatccgcggcccgcggtattcgcccgggcaaggagaaaaatgagtttaatatagtatgaatacgatgaaaaattcgttaaaatagagctatcaacacacaatggggagtaaagtgatggccaaactacaggaaaaaagcaaaaacacaacacagattttaagcttaattgaacatttccggcaaaacggggatgaacaaagggtggaaaaagcgaaaaacctgctgaaaaaagtccgccgcgaagatttccatatcgcgttttgcgggcatttttcagccggcaagtccaccatgattaacgcacttctaggcagccgtgtccttccgtcaagcccgattccgacgagcgccaatctcgtcaaaattgaaaaggggacggaagactgcgccattgtttatgaaaaaggggaagcccctttgatttttcacgcgccgtatgattttgaagttgtcaaagattattgtaaaaaggggcatgtccaggaaattgaaatcacaaagcctgattccaatttgccggcgggattgacggtgatggatacgccgggtgtcgattcaaccgacgatgcgcaccggattgccacggaatcggcgatttatatggcggaccttgtcttttatgtaatggattacaaccatgtccagtcggaactgaattttacctttacaaaagaactgctcgatcacgggcttgaactttatttaattattaaccagattgacaagcaccggaatgaagagctgccgttttccgcattccggcggggggttgaaaatgcatttgcatcctggcatgtccggccgggtggcattttttacacctctttaaaagacccggatcatcccgataatgaattcggccggctgaaagcgctcattgaccgcgccgtttccgaaaaatccgcccggctggaacggtctgttgaagcatccttaagcgtgctggaaaaagaacatgccgactggcttgaagtacagtacgcgccgcaaaaagcagcatatggggaagtgcttgcaaaatacccaggaaccgggaaagcggaagcatatgaagaggaacaagagtggcttgaaaaagaacgggtgcttcttgcccgcattgaaaattgggaggaagaaacgcggcaaaagcttcaaacacttctggacggcgcctatttaatgccgtttgaaacgagagagaaagcaaaagcgtatcttgaaagcatgcaaaaagatttccaggccggcggtttttttgcgaagaagaaaaaaaccgaagaagcaagaaaacagcggctccatgatttctatgccgacctgaaagccaatgttgaggcacaaatcgactggcatctccgcccgctggcgcaagaagctttaaaaacgctccatctcgctggcgcgcaaatgctggaacaacaggccggcatgcttaaagcagatttcagcgaagcaatgcttgccgcccaggtaaaagagggcgcccggctgacaggcgactacatcctccattattgcgaaaatgtctcggacgaaataaaacgttccgcccgccaggcttgggacgattggaaagcgcccgtcctgaagcaggctgccttggaaacggaggaacagcttaaaatggcccggaaaaaggccgggcaggcaaaagaactggcagaggcttacaggcatcttgaaaaaatagaaaggcagcttgtcgaaaaacgggctgaactggaagcacctgccgcacatccggaacagctgctggctgaaatagagaaagaatgggcggatgaaaaggcgcattaccgggtgtaccgcggggaaaaggatgcaaaacagccggaagaaaccggcaaggctacagaaacctccgccccggcagaaaaacaagccggcacattgccgcttgaaaccgcgcttgccaaaatggagcaggcgattacgctgctaaaagatcagcacggttttaaacggtataccgaaacgctcagtacaaaaagcaggcgcctgaaaaaccgccgctataccgttgcgctgttcggcgcgttcagcgcgggaaaatcgtcttttgcaaacgcgcttgccggcgaaaaagtgctgccagtttcaccgaatccgacaacagcggccatttgccggatctgcccgcctgatgcggcacatccgcataaaacggcagccgtccagctgaaaacggaggcacagatgctggaagatgtcaacaagtcgctcgctgttttcgggctcggctgccgttctttcggggaagcgcttgaaaaaattgaaactttgcacgcaaaagaaacgggcaaagcaaacgaaaaagtccatctctcttttttgcgtgcctttgcgaaaggcttccctgatttcaacgggcgggccgggcagaacttgaatgccggaatggaagcgttccgccggtttgttgccgatgaaacccagtcttgttttgttgagtccattgatttgttttatgattgcccgttcacaaggcttggcattacgctggtcgatacgcccggagccgactcgatcaatgcccgtcataccggcgtggcatttgaatatattaaagactcggatgcggttttcttcgtcacatactataaccatgccttcgcgcgcgcagacagggaatttctcatccagctcgggcgggtaaaagaagcatttgaactggataagatgttttttattgtcaatgcgattgatcttgcctcgtccggcgaagaatataaagaagtgatggactatgtcagggggcagctgctccattttggcatccgcaacccgcgcctgtatggtgtatcaagcctgcttgcgctttcaggcaggcggaaggaagcgaaaatggccgaatttgaagccgggttccgccaatttctcgaccatgatttgctgaatatggtgcttcagtccgcacaaaacgagctggaacgcggcctcgaaatggtggatgccgtgatccgcgatgccaatgaatcaattgaaacaaagaaagcgaaacgggaactcctccggaaacggcgggaagaggcagaagccattttgaaaaatacaaagctggcgttcttcacagacagcgttatgcaggagcagaaggagctgctctattacgtgaaacagcgtgttttttaccgcttcgccgactttttcaaggaagcttttaatccggcaacggtaaaggcagcgaaagatttgccgggcgcccttcaggagcttgcagaactcgtcggttatgattttgcgcaggagatgcgggcgacaaatgtgaggcttgaagcccattgccggaatttattcgcctcccaaagcgcggaatggaacagggagataaaacgtttgcttcctgatttgtccgtcagtacgtttgaagcgggcgcacacgctacgcctgattttcccgcggctttttcggagacggatttgaagccttttgaaaaggcattccgccattttaaaaatgcacgcaccttttttgaaaaagggggaaaagccggcatgcaggaagaactgcaggccgtgttcgaaccgcttgcacagcagtatcttgacgtgcagggagaaaagcttgccggttcgttccgatcatggctggaggaagagtttgcaaaaatgcaatcggaagctttgctcgatattgccgaacagttcgatgcccgccttgaagcccttagaaagagcgtggacgtggtagaatggatggaaatccgcgaaaaactcgttttgccttcctaagggcaataaaaatggtgtgagaaaacataacattttgttgacaaaaaaactcacatcgaatatagtaaaaatatagaaaaggagcgtataacatgggtcgaaaagaaatccgccgttcgatgccgcttttgccgatcgggactgttatgaaactgacagatttaacggcccggcagatccgttattatgaagaacatgagctgattacaccggcaaggacggaaggcaaccgccgcctttattccttaaatgatgtcgaccggcttcttgatattaaagatttgctggatcaggggatcaatattgcgggtatcaaaaaaatcttattgatgaacgaccaccgcggaaccgggccggtactcgtcaaaaatcatgcaacggataaagaaatccgcaaacggcttcgccaggaactgctgcaggccggtcgttttcaaagcccgagccagcggttgagcgatgcaccccgttttttccattaacgttgttgaaaagctagttttatagcttagatatatactttttattgcctaaagggaggaatactgttcatgcctaagtttacacgcgaagatattttgaagaatgccaaagaacaaaatgtgaaattcatccgcttgcagttcacggatattttagggacgattaaaaacgtcgaaatcccgctcagccagcttgaaaaagcgctcgacaataaaatcatgttcgacggctcttcgattgaaggatttgtccggattgaagaatcggatatgtatctgtatccggactatgatacatgggttattttcccgtggacggctgagaaagggaaagttgcccgcctgatttgcgatatttataatccggacggcaccccgtttgaaggagatccgcggaataacctgaagcgagtattgaaagaaatggaagaacttggcttcacgagttttaatcttgggcctgaaccggaattcttcctctttaagctgaatgaaaaaaatgaaccgacccttgagctgaatgacaacggtggctattttgacctggcgccgacagatcttggcgaaaactgccggcgcgacatcgtattggaactcgaggaaatgggctttgaaattgaagcatcccaccatgaagttgcgcctggccagcacgaaattgattttaaatatgcggatgctgtcagggcatgcgacaatatccagacctttaaactggtggtcaagacaattgcacgcaaacacggcctgcatgcgacgtttatgccgaaaccgttgtttggcgtgaacggctccgggatgcactccaatctttcgctctttaaaggaaaagaaaatgcattctatgatccgaacgatgcagaactgcagctgagcgatacggcataccagttcatcgccggcatcataaagcatgcgccgaactttacggccgtaacgaatccgacggtgaactcctataaacggcttgtgccgggttatgaagcgccttgttatgttgcttggtccgcccgcaaccgcagcccgctcatgcgtattccggcttcccgcggcttaagcacgcgcgttgaagtgcgcagtgttgacccgtctgcgaacccgtacctcgcgctcgccgtcctgttaaaagcagggcttgacggcatcgcgaacaaattgcaggcgccggaaccagtcgaccgcaacatctatgtcatgacgaaagaagaaagagaagaagccggcattgtcgacctcccgggcacgctgctgcaggcgctggaaaacttaaaatcggatgaagtaatggtagacgcccttggcgatcacatcatcgaacacttccttgaagcaaaggaaattgaatgggatatgttccgcacacaagtccaccaatgggaaagagaccaatacctgcaaatgtattaataaacgaaaccctttgaagcgtaaggctttgaggggtttttgtttatcgggcagtttcccatctcacgctcagaaaaacaaaatgcccgataattgccccgttttttccttcaaaaatagattggaagcccggaaaacctcaagtgccacaggcatttttgccatcaaactcgcatatgctctattaaaaaagaagcagccgaaactgcctctttttgatcagtgcaccatttgcctgtacagcccgatgacaacgccgagaatggtgacgtttttcaatatgatcggttccattgtctggttttcaggctgcagccggaagtagtctttttccttgaaaaatctttttactgtcgcttcattttcatctgtcatggcgaccacgatatccccgttgcttgccgtctgctgggagcggacaatcacataatcgccgtttaaaatccctgcatccaccatgctgtccccttcgatttccagcatgtagacggactcgtcagacgggacaagatgttccggaagcggaaaatactcttcaatattttctacagccgtaatcggtatgcctgctgttacctttccgacgataggcacattgacaacattttgggccggtatttcttcatcatggtccaaaatttcaatcgctctcggctttgtagggtcgcgcctgatcagccctttgctttcaagccttgcgagatggccatggacagttgaactggaagcaagcccgactgcctggccaatttcccgcacggaagggggatagccttttgttttgacttcatgcttgatgaaatcaagtatcgcctgttgccgttttgatagttttgccattatatccacctcgtcgcagttttgtttggcacccgcgctgcgtacggggacgcaaacgggaggaatgccattatttgctattattatatcacactgcagaagataaaacaaacgtaagttcgaaaaaatgttgacgaaaaacaggcgttcgttttataatagaactggtgattggacgaacgaatattcgcgggaggaagatggagatgtcacgattatggaaaaagtataactatgttatgattttagcaggggttgcgcttgttttcggatttttcatgattggaagtctgcgggatccatccccacactatatcaaaatcagcgttacagagggcgagacgctttggaatatcgccggtcagtatgcagaacagggcaaaatgtcgagggaagcatttatcagctgggttgagcgccataatgggattaacggcaacatgatcaaagccggcgaaaaaattgtcattccggtagaaaaaaatgaaatcagggatgataaaagggaacttgcgatgaaatcacaatgggagacgaaaaaatgaaagttgttttatattgcagagtaagcacggaaaaagaaagccaggaaacttctttggcgaggcagcgggaagagctggagaagctttcggattcccgcggttttcaagtggccggggtgatctgcgaccgggcaagcggctacgacctggacaggcccggcatccttgaacttcttgatatcattggaaatgaaaaggttgacgccgtactggtgcaggatgaaacacggattggaagaggaaatgcaaaaattgcactgctccattttttatataaaaaaggggtcaaagtatattgttatgcacaaaacggtgaactcgaactttcggaatccgattcaatggtgttgaaaattgtcagcatggttgaagagtaccagcgaaagctgcataacttaaaaatcaaaagggggatggaacgcgcagtcagaaacggctaccgcccggaaaaaaatttaaaaggaaagcggaatccggacggcagggagaggaaggaagtgccggttgaagaaattatccgcctgcgggacaacggcctgacttttcaggagattgctgcgacaatgcgcggttttggctatcaagtttcaaaagcaaccgtccaccggcgttacagggaatatatggaggaaacggggcatgatcaatagtacaaaaaccggtttcgccggtgcgctttctttgcaggcgggcctatattttagtaagatggcatcaatcacggattaaaggagagaaaatatgctttcaaaggaaaaaatggcaagaataaacgaattggcgaaaaaagcgaaaaccggcggcctgacaggtgaggaagcaaaagaacagtcaaagttgcgaagcgagtatttgcaggcgttccgctcttcattcagaaaaacgattgaaaatgtccgtgtgcttgaccccgaaggccaggacgttaccccggaaaaaataaagcaaatccaaacaaaaagaaagctgcactaaaggggcgccatcctgcttctttcttacaaaatccatacaaaatggtgtatgtgtaaaattttagaaaaacttgacacataccaaaatggtaaaagagttgtgttatgggtttcacttgccttaatataaaattgtaacccatgaagaaaggatgttagcagatgtttgataaaacggacgaactggcagtcacaacaatccggactttgtccattgacgccattgaaaaagcaaaatccggccatccggggcttccgatgggggctgcgccaatggcatacaccctctggacaagatttatgaaccaaaacccggaaaacccgcactggtttaaccgggaccgtttcgtattatccgcagggcatggttccatgctgctttatagcctgctccatttatccggctatgcattaagcatggatgatattaaaaatttccggcaatacggcagcaaaaccccgggacatccggaatacgggcatacggaaggcgtggaagcaacgaccggtccgctcgggcaggggattgccatgtcagtcgggatggcgatggcagaacggcatctggcggctgtatacaacaaagaaaatttccccgtcattgaccattatacatatgctttatgcggagacggcgacttaatggaaggtgtatctgccgaagctgcttccttggcgggacatttaaaattgggacgcctcattgtattgtacgattccaatgacatttcccttgacggcgagttaaacaaggccttttccgaaagtgttgccgaccggtttaaagcatacggctggcagtatttgcgggttgaagacgggaatgatatggcacaggtcgcaaaagcgatcgaggaagcaaaggcggatacaagccggccgacactcatcgaagtgaaaacgatcatcggttacggttccccgaacaaatccgggaaatcggctgcccacggcgctccgctcggagaagatgaactgaaactgacgaaagaagcgtataaatggacgtttgaagaagacttctatgttccggatgaagtttacgcccggttccgtgaattggttgtagaaaacggcgtgaaaaaggaacaagagtgggcgtccctgtttgaggcttatgaaaaacaatacccgcagcttgcggctgaactaaaacaggcgataaaaggcgagcttccggatggatgggacaaggacattccggtctatgaagaaggcaaaatccttgccagccgtgcggcaagcggggaagtgctaaatgccgtatccaaacatttgccgtctttgttcgggggatctgccgaccttgccggatccaacaatacgcggttgaaagaagacaaggactatatgccggatgcctatgaagggcgcaatatctggtttggtgtccgcgaatttgcgatgggcgcagccatgaacggcatggcgcttcatggcggtgtgcatgtatacggcggcacgttctttgttttctcggattatttgcgtcctgccatccgcctggccgcgcttatgggcctcccggtaacatacgtctttacgcatgacagtatcgcagtcggggaagacgggccgacgcatgaaccggttgaacagcttccttctttaagagcgatgccgggcttgtcggtcatccgccccgcggacggcaatgaaacggcggctgcctggcggctggccctgtcatctgaaaaccatccgactgcgcttgttttgacgcgccaagggctgccaaccttgaaagggacggctgaaaaagcgctggaaggcgtttcaaaaggcgcctatgtcgtgtcccctgcacaaaaggaaatggctgacgttctccttcttgccagcgggtcggaagtccatctggctgtgctcgcgcagcagcaattggcggaacaaaagattgatgctgctgttgtcagcatgccgtcatgggaccgttttgaacagcaaagcaaagaatacaaagaatccgtattgccggcacaggtgaaaaaacgccttgccattgaaatggcttcaccattcggctgggaaaggtataccggcgatgaaggcgatattttgtcggttgatacgtttggcgcaagcggaaacggcaataccgttgtggaaaaatacggatttaccgttgaaaatgttgtggcacgtgtaaaaaaattattgggcatgtaatcgttccgggtctgcttttgcggtattcgcaaaagcaggctcatttttatgaaggaagggtataagaatagggggcttgaagtaccggagctgagttgaattagcttctcccttggacgcaaccgattttgcagcaacgctttgatacatttacgcttattttcctgtatgtacgtgtaatcgaatgttccacagtaattttttaaattttgttacaacaaacgacaacttttttggggcccgtccattatagtgaaggtaacaaagttgcgggagtgagatcatatgcgatcctattctatctacctgataaaagaggagtttgcacaatattattacggcagggaacaaatgttttttaacctttttcaccagtatgcgcacgtttccggaagtttgaaaaatgtcctcagcagacagatccattatattacaaagcagattccgctcttgcctgtccatcatgtcttgcagccgttattttctgacaccattaacatgacgaaaaccggcgcttgccaacttctttcaaaaaaagaggggcaggtgctggaagtgaccatagaagaaagaatgctccgcctgaacgtatccggtagttatgatacagaaaccgccgtttttgaaattctgaggaacttcaaaggaaatctgcttgcaatcgattacgaccataaacgatacggctggataaaaccggttaaagaaagaaaattcgtgtgagaagaaaacaagtattgtataattcaaatggatttagtacactgtatgtgagtgaaggaggtatattatgatttgggtgttcgttcttgtagcccttattgctcttttggcaggcgcagcaatcgggtttttcatcgcccgtaaatatatgatgaattacctgaagaaaaatccgccgattaatgaacaaatgctgagaatgatgatgatgcaaatgggtatgaagccgtctcagaagaaaattaatcaaatgatgaatgccatgaacaaacaaatgaaatcttaagctggatacccggcttttgtggtatatccatcaccattgttaagcttctcacgattctgtaaaccactttttctgccaatttcctgcacagaaaaggtggtttttgatttcatgttccatttttatgctttcgtgatgttttttctctttcaatcagtttatgttaaaatgaaatgagccgggatggggagtgaaccgatggctgatgtaacagtatggctgtctttcggggcaggtttcatgagctttatatcgccttgctgtctgccgctttaccctgcttttgtttcttatataaccggcgcttctgttagccggttaaaaagcgggggcggcatgcgggagtggaaaagtatcctgcataccgtttggttcctcgcaggattttccacagtttttattgcattggggtttggtgcttcctggatcgggagtttttttatccgttaccaggatgccatccggcagctcggtgcagtcgcgctcattttttttgggctgcttgctgcgggcatttttcagccggggatctttatgaaagtgtaccgaatcgatgtaaaaaagcagccggccggattcttgggttcttttctcgtcgggcttgtgtttgctgccggctggacgccttgcaccgggccgattcttgcctcggtattggcgatggcagtggcccatccggcttctgcgtccgtctatatggctgcatatgtgttcggcttctccatccctttttttgtccttgctttttttatcggacgattggggtggatgcaaaaatatagcgtgaaactattaaaatggagcggtgttgtgatgatattcgccggaatcctgttcttttttgactggatgcctgtcatttccggttatatgagtgcgctgttcgggggattccagggattttaatccgggttgcattttaacggatcaatgaggaggagaaattcgatcgatggcaaatgtgttgattgtggatgatgcaaaatttatgaggatgactttggcgaaaatgctggaaaacggcggccataccgttgtgggcgaagcggagaacgggcagcgggcgattgaattataccgtgaagtcaggccggatgtcgttacgatggacattaccatgccggagatgaccggcattgaagctgtgaaaaagatcgtgcgcgaattcccggacgcaaaaattattatttgctccgcgcttggccagcaaaaactggtcgtcgaagcaatagaatccggcgcaaaggattttatcgtcaagccttttgatgaaacgcgtgttttagaagcggttgaacgcgttttgaactgacaggcgccgcaaaaaaagagaggcaggcattccggctggacatcaaccccgcttttatggttgaatattagcataggaaacttatatttaccgtagctatatttattttgttaaaaatctgttactaaagagggttgagacatggaaggcattgtcatctcgttcattgttgcgattttgatggggtctttggtcatttttgtccgtttaaaagggcagaacaagcccgtttccacaaaaaaaatattgttgccgccggtctttatgagtactggggcattgatgtttgtcgtcccgtattttcgcgtgacgcctgccgaagtattggaagcatttgtggtcggaatgttcttttccatatttttaattaaaacttcccgtttcgaagtccgtgacggaaatgtatatttaaaacggtcgaaagcttttccgtttattctgatcgggctccttctcatccggttgctgatgaaggtggtactcagctcctcgattcaaatcgggcagctcagcggcatgttttttctgctcgcattcggcatgattctgccgtggcgcgtcgccatgtatattcagtacaggcggctcatacaggaactggatgaaggggtccgtgcttgaaaaacatcattcgcttttaccgaatgatgttttttcatttaccgggccgattttgttttttcctgcgcaaacaaatgctcgtagcggctgtcatcgatgtccagctgctttaatttttttcggaggaatttatggtcccttcttggcgtggcgaggatatagccctgaatgatattgtccagtgtcattttctttgcatttttggaaagcgccacatccccgatttttgccgcgatttttttcctggccacatcgcggaacaattccgggacagggcttactagttcttcaagcagttctctgtactccggcgtccagaggtgccgcgttttaaggattgtctcttcctgctggtcaagtatcgattttccgtcttctttcggaagccttttcaaaaattttcggaacataaaatagccgccaactgaaaagagaaaaaccagacagaggatccatattaaaataaaagcagaaaaccaaccgcttagcatgacgctctcctccttggcaagtactcccttttattataagaaaagatggactgttttttcaattaaaaaaggaaaaacccttccgccggcgggcaggggcactgaaaaagtgatgttttatttttacaagagatcggatgcaaaaaaacggtgagacactttgaatgtggtgcctcgccgtttttttgttttcttttggactttttcatctgcctccggaaagcggaaaagatttttactgttttttcagcgtttcaaaagtgtcttgcagcagaacaatcgttttttcgatttcttcttttgttcctttttttccgtctgccagcctgatcgggtcgccaaagcgcacgcgttttggctttctcgcaatgacttctttcaatgttttcggcccttcgtaaatagccgggacaagcggaacatttgcttttaaagctatcgtcacggcaccgcgttttaaagaaacatgttcgcttttgcgtgttccggaagggaaaatgccgacgactttcccttcttttaaaagtttcattggaattttaatcgagctcgggcccggattttcacgattgactggaaaagcgtgcaacttcgtgaacagccattttatccattttttagaaaaaagttcctgtttcgccatataatgaatttggacaggccagatggcaatcgccaggtaaataatgtccagccatgtttggtgggtacaaacgaccacaaacggagccgcagggattttctctttgttttcttttttgattttgccgccaagcagccacaaaatggcggcaacaacgtaatagccaaaccggtacatgattacacccccacaagcattttatactatacaggcatgcttgttctactaatttggaaaaaaatatttaaaaacgcgaaatgaatcattggaaaaaagaagatcgcagccaaaacagcgtttacggaaagattaaaaagaagaaggaatatgataaagcaaggcagaatttcatacggagggaaatgtattgcataaaagatgggttgtgatatggacgatggcattcctatttattcagggaaccgggccctgtgcagcaggggacagggaaggccgcggaaaaaaagaaacagacgcaaaaattgccgacattttgcaggccgcccctttaaaaggcgggattgttgcgatcagcgtccgttcggctgataccggggaactgctctacgaacaaaatggcagcacgctattgcgccctgcgtccaatatgaaactgctgaccgcggccgccgcgcttgaaacactcgggggaaatgcccgttttaaaacgggcgtgtaccgcacgggcgcgatcgaaaacggtacgctttacggtgatatatacatacaagggggaggagatcctgctttattaaaatccgatttagcggactgggcggctgaattaaagaaacaggggatccggcgtattcagggggacctggtcggggatgattcgcgctatgacgatattcggtattcacttgacttgccgtggagcgatgagcaggaatattacggggcacaaatttcggctttaacgttatcgcctgaccgcgattatgatgcagggacggccatttttgaagtcgccccggcaaaaaaacccggcatgaaagcgcggatcaaaatggttccggaaagcgggatggttaaactggacaaccatgtccgaaccgtgccggatggcaagcaggaagaggacgatatcgtaatcagccgggcacacggcgggaatacgtttacggcaagcgggacgattactgccgattcagccgcagtccggcaatggaaagcggtctgggacccggcgacatgggtgctgtctgttttcaaaaaaactttagaggaaaacgggatcaccgtgcaaggtacgatcaaaacgggcagggtgaaggatgcggcagttccggttcttttttcccaatcgccacctttatcaagcatcatggcgccgtttttaaaattcagcaataacaccatcgccgaaatgcttgtaaaagaaatggggaaaacggaaaaaggggaaggaagctgggaaaaagggcttgaagtaatccgcggcgttgcaagaaactttggcatggatcctgacctgatgatgctccgcgacggttcgggcatatcccacgccgatttggtccgggcaaatgatttgacggcgcttttataccggatacaggaaaaagactggtttccgtgctttttcgatgcgctgcccgttgcaggggctgaaaacaggctggaaggcggaaccctcagaaaccggtttaaggggacggccgctgcaggacgggtttttgccaaaacagggtcgattacaggcgtcagcacactttccggctatatgcaggcaacatccgggaaaaagctgattttttctattttgatcaataatgtactggatgaagaagcagtacatcaagcggaagagcaaatcgtactgcaattcatcaaccaggggggagaaggatgagaaaaggaaaacggctgcaggccggggatacgatcgggctggtcgcgcctgcaagcccggtttcaatcgaaaggattcagactgcaattgccatattgcggcggctcggtttccgggtaaaaaccggagaaaatgcgggaaaagtttatggcgggtatatggccggcacgccgcttgaacgggcggccgatcttcatgcgatgtttgcagacgatgacgtgcaggcgattctttgtttgcgtggcggatacggggcgacgcaaattttgccgtatctggaccttgaatggatccgggagaatccaaaattattcatcggttacagcgatattacagccttgcatattgctttccagcaaaaatgcggcctcgccacgatccatggcccgatggcggctgtcgaatttatcaaagaagatgatctttcggtacaatcattgctgcagctggcgtcaaccggtgttcctgccggcagttacacgggggaggcgtggagtgaaggggccgtgacagcaccgcttacaggcgggaatctgtcattgatttgcgcactgatgggaacgccgtttgaaattgatacaagcgggaaaattctttttcttgaagaagtgcatgaagaaccttatgcgatcgaccggatgctgacccagcttcagctttccggaaaactggatgacgcctccgggtttttgctcggccaatggacggactgtgagccggaagcatatgcggatggctttacggcacaggaagtcctggaaaaatttttttgcgggatcggcaagccggtgcttgccggcatacaatccgggcacggcactccgaatctggcgcttccgctcggcatctcggtcacactggatacggccggccaacgcttgcatttttgcgaaaccattgtcactgaataagcttattgcatgattgtttctcatatatataaccgcatgtttattgcccttacggtatgcccgaaagcaggccggcctggcaaggggtttacaatgcagacgcacatccgggccgtttaaaccggcgcctgttttcccgcttgcaggcggatgcacaaacgatgcgcttccaactgccatattgtaaaagcagcaatggataaaggagtgacaaatttggcagattccagtcagtattatggcggctatccgtgccgtatgggcatcatcaccattatggcggatacggcggttattcgtacggccattcgcacggttacccatacggacatcaccaccattaccattccgggcattacggccacggcggctacgggaattttccgggccacggatacagggaagaaaaataaaatgctttaccggaaaagatgcctgcaagcaggcatcttttccccatttttgcagcgtaattttttcaggcggatggatccggcagccatgaaggtttcaatccggaaaaaatcatggcatttagtggagaaaaaataaaatgaagaaaaaaataatcaattcgtcttgactccccatacataatctgctattataataaagaattatttttgttcggtatggtaaggaaggaaaaagttttaaaactgaccccctgaaatcacttgagcaaggatagtaattttgtgttcaaacacattaggaggaaacaaaatggaacaaggtaaagtaaaatggtttaattcggaaaaaggctacggatttatcgaacgcgaaggcggaagcgatgtatttgttcacttctcagcgattcagggcgaaggttttaaaactttggaagaaggccaatccgtatcttttgatattgaagaaggcaaccgcggaccacaagctgcgaacgtttcgaaattataaaaaacaggcctttatggcctgttttttttttttttttttgtcctggggatccaggttcaggcatccctttgcccggaacggataaaaagccctttcatccggccacttcggatgccggaaaaaatagatacatattgcaatcgcgatctttcataaatatatgataagagcaatgccaatatggataaaggagacaggggaattttgcaaatcagagaaatggcaacggaattactaaaaaacgccgggtgcaccgcccatttgaaaataaagaaacagttcccaggcgggcgtctcgttggcggcaaatatcatccgcacacccatacgattacgctgtatacagagacaatccggcggcaatgcgagctattgtttgggagctgcaaatggtttatgtcttacactacgattgtgcttgcacatgaaatcggccatgcgatggatgaaaatctgcctgcattgtccgccgcctttgaagagtccgggcgtttgccggaaaagcaagcactggcgcttacgattgaacaaaatgcgtgggattttgccggccggctggttcccgcgcatcttaggccgctttttcaaaaaatcatggatgagtcgctatctgcttaccgccagccggtgatggcgggtgcgcattaagaaaaagcaaaaaaccgggagaaggcttgccttctcccggttttttgctttatttaacggttggcagtgtcccgtgcacatagggcggtgccggttgttgcccgacacggtcattggttgcaaaaggttcgacgaatttaaattcgccttttccatccatgctttcgccactcgcccatctccctttggcactttctttgccttccgaatgattgataaaaagatggcaaaattcttcgggttcctgatcaggcgggtatgtgctcggtacgacaaacatctgctcctactcccgtaccagttttgccttgcaatttttgtctacccgcgggttaacaggttaaacattccggcttcagtgtttaagaacggggcaaaaaggcaatataaaaagaaatctgatttacatacaagggggaacttacgatgcaaaataccgctgcgaaaaaagaaaattattttgaaaaaaataaatcgaaagtggatattcacgtgttcgacaaggaaggctcccgcccgtttgcaaacttccctttttccagccggaaagtgtatgagtttttcgattatacgctgcgtacaccgctcgaaaaaacagatgctttctatgaaatcttaaaaatgccgtttgcatgtgagatttggattttgccggtaaccgaaaaatcctccaattttatgcgggaaattcaagaaccgaaaaccgccgctttgttttcctttttggcgaaagtaaaagacaccattcagcgcgaccgcatctttattgtcacagatcaaagccatgcagcggcattggctgaagaaatggaaaagctcggctttacgatgacggaacccggcacggcggaactggaaaaactcgtcatttctttcggaaattgacatggggacacgcgtatgcatttaattggaatttttgccggacccggggaagcagcagaagccgttttacagcatcatagagaaaatgtgcgcattactgtcattgccaacaatgatgcggccctccgtgaagtcggacgtgaagccggaaaaggcgtaaacggaatatgccttcatacggatgtggatctcatggacgaactgaaagcactgttcaaaaaagaaacatatccggaaaaaatattggaaaagatccttgaactcggaattccgcttgaaattgccacccggtatgtcggtgcggcggcaaacggaaaaatcgtcgtattggcaaacgaataatctttccttgcggacaaaaaagatcaagccctgccaaatgcaggccttgatcttttttgttattcgcgaaaatgaaaagtttctatttttttatatttttagccttgtataatcatgcagattgaattataataatgcacatacataacaatagggagatgaaaatgttgaaaatagggattgtcggggcaaacggatacagcggcgcggaacttgtcagacttcttgcccgccatccccgcgcacaactggaaatgttgatatcgcatcgcacaaaaggcacgatgctgaccgcacactacccgcatttccagcacatcaccgaagccgaactggaagacatggttccggatgaaatcgcaggcagggtggaactattgtttttcgcaacgccatccggggtagcaaaaaactgggtaccgcgctttgttgaaaaaggtttaaagtgcatcgacctgtccggggatttcagactgggcggggaagcgtacaggcaatggtataaacgcgaacccgccccgcaaaaagagctggacaaagcaatctacggccttgctgaaatgaatgcggacaggataaaagaagcgcaattgatcgccaatcccggctgctttccgaccgcagcgcttttagggcttctcccggctgttcaagaggagcttattgacacttcctttattgtgattgacggcaaaaccggtgtttccggcgcgggaagaaacccttccctaagcaacttatttactgaagtaaatgaaaataccggcgcgtacaaagtcggcagccaccagcatacaccggaaatcgagcggttcatcaaggagtttgccggaagggaagcgaaaatttcgtttacgccccatctcattccgatgacaagggggattctttgcacgatatacgcgcctttaacaaaaaaagtcaccactgaagatgtgcgccaatattataggaaagtgtataaaggccggaaatttatccggatcaggccggccggttcttttccatctacaaaggaagtatacgcctcaaattactgtgatataggcgtccatgcggatgaacggacgggaaggctcgtggtcatttctgccattgacaatcttgtaaaaggtgcaagcgggcaggcagtccaaaatatgaatctgcttttcgggctggaagaagatacagggctcaagtctattccggtttatccataaggcaatcttaaacataccgtttatatatggaggatggcaatgaatcaattatatgagaaagaaagtactgcattttttaccaaaacggacggaaacatctcgagcccggctggattttttgccggcgggctccattgcggcattaaaagaaaacgcccggaccttgggtggctttactccgctgtcccggcacaagcggctgcggtctatacgacgaatcagtttcaggcagcgcccatccaggtcacaaaggaaagcattgtggaaagcgggaagctgtccggcatcattgtgaattcgggaaatgcaaactcctttacaggcagtgaaggcctccgccacgcccgcctgatgcggaaatggttcgccgcccaaatcggcgtaaacgaaaaccaggtcggcgttgcctcaacaggtgtcattggcgagtttttgccggttgaaaaaattgaaaccggcatccgccgtatcgataaaggagagggggcgtcccatccagacctttttgaaaaagcgatactcacgacggacacctttcaaaaacgcgcctgcgcaacacttgaaattggcgggaaaacggtcaccgttgccggctgcgccaaaggatcggggatgatccatccaaacatggcaacgatgctcgcttttatgacgacagatgccaaagtggaagcggctgcattgcaaaacctgctgaaacaaacggtcgatgaaacgttcaatatgatcacggtggacggcgacacaagcacaaatgacatggtgattgtgatggcaaacgggctggccggaaatgatacgctttcatacgcacacccggattggaaaaaatttgcagaaagctttgcctatattgcccgggaacttgccaaacaaattgcaagggacggggaaggcgcgacgaaactggttgaagtctgtgtaaccggggctgaaacggaaaaagaggcgcaagcagccgcaaaaaccgttatcggctcaaatttggtaaaagccgctatctttggcgccgatgcgaactggggaaggattatcaatgcgatcggatacagcggcgtccaagtggatgaacaggcgctttctgtccgtatcggcgggatttccgtagtcgaaaaaggcatgccggcttcctattccgaagacgaggcacatgcctatttaaaggaaaatgacaaaatctgtatggccatcgacctcggggccggaacttgccagggtacggcgtggggatgcgacctgacctatgattatgtgaaaatcaatgccacttaccgttcataatgttggtgcacacatttttgcataattatacaagataataactatttataaggggtgggccaaattggcatacgttgtcatcaagtgcggcggcagcatcctccatcagctgccggatgcattttttgaaaatctggtgcaaatcaaagcgcgattcgggcttgatcctgttatcgtccacggcggggggccggcgatatcgaccatgctggaaaaaatgcagatcaagtcgcaattcaaaaacgggatgcgtgtcacaaccgagccggtgttaaacgtcgttgagatggtgctttccggttccatcaacaaatggattacgcgccggctctcacaggcgggggccaaagcggtcggcatcagcggaaccgactcagggcttttaacagccagaaagattgaggcacccaatctcgggtatgtcggggaaatcgaatcggtaaatgaacaggtgctgcatgctttattgcggcagcagtttatcccggtcatttccccggttgcggcggataaaaacggccagcgcttgaatgtcaatgctgatttggcggcagccgcggttgcccgaaaaatgaacgcgcgtgtttggatggtgacggatgtccccggggtcatgatggaagggaaagtgctcccttatcttacccccgggcaggttgacgggctcatccaaaagcaagtcattactggcggcatgattccaaaagtccgggcagcagtggaatgcatccggtccggcgtaaaagaagtggtgattgtggacgggacagaagaagacagcctcctgtttttggcaggcggcggaaaaaccgggacgaaatttacagggaacggggttttgatcgatggataagatggcgcaaacggtacagaaacaagcacttatgcagacgtacagccggacgccggtaaagtttgtaaaaggaaaaggcagttatgtatgggatgaaaacggagaaaaatatttggatttcacttcgggcattgccgtttgcaatctcggccatgtccccgaaaaagtaaaaaacaaagtggccggccagctagaccgaatctggcatacttccaatctgtttgagatcgggccgcaggaagagctggctgaaaaactggcagctttaagcgcatttgaccgggcgttttttgcaaacagcggcgcggaagccaatgaagcggcgatcaaactggcccgcctcgatgcaaaaaaacgcggcaaatcggggcccatcgtcacctttaagcattcgttccacggccggacactcgggacattgtcggcaacggcacaggaaaaaatccagcatggctttgaaccgcttgtgccgggattcatctatttgccgtttaacgacattgcggcactccgcgatctcgcaaaaataaagcccattgccgtcatgtttgaactgattcagggggaaggcggcgtcattccggcagaacaggaatgggtggatgcccttgtccgcgcgtgcagggcgaacgattgtgcaatcattgtggatgaagtgcagacgggcatgggccggaccggtacactgtttgcctatgaacagtacggcttcgaaccggatatcatgacgcttgcaaaagggctggggtctggcattccgattggcgccatgctcgcgaaagaaaaaattgcgcaaagctttacgcccggcacgcacggcagcacttttggcggcaacccgctatccgcgacagccggcctggcgacacttgaaacgtttgcggaagaggatatcatcgaacatgtccaaaaacagagcatcgatttttgggcaaaactggaagagttgaaagcacaatttccttttattaaagaaatccgcggaaaagggctgatggccggccttgaaacggaaatggaagctgcgacaatcacccgggtggcattgaccgagcatttgcttgtattaacagcagggccgcatgtggtccgcctgttgccgccgcttgtgattacggaaaaggaaacggcgctttttgccaaaaaaatgcaaacggtttttgccaaggcaaaccaaaacgatctttaaccggcaaagagacaagggaggacagaaaacgtggcaagaggatatctcattcttgaaacgggagaaatttttgaaggcttttttgcgggaaatcccgctgaaacaacgggagaagtggtatttaacaccggcatgacgggatatcaggaaatgatgaccgacccgtcgtacaccgggcagatcctggtgttttgttaccctttaattggcaattacggcgtaaacggcgatgatcacgaaagcaaaagcatctcggcgcgcgcggttgtgaccggcgaaatatgcgcaagcccgagtttttataaagtagaaaaaacggccctttcctttttggaaaagtcggatgtcccttgcctttcaggggtggacacgcgcgcgcttgtaaaaacgatccgcaaacgcggcactgtgcgcggccttgtttcaacgtcccgcgatcaaaaagtgccatgcggcggtgatgaatttttcgtagccgaagttgccataaaacaaccggaaacctatggagacggccctttgcacattgctttgatggatttcggctacaaaaaatccattctgcaatacttgcttgaccgcaactgcaaagtgaccgtcgtaccctttgattttacggcaaaacaaatggcggaacttgcacctgacggcattgtcatttcaaacggccctggggatcctgctaaactggccgagtggctgccggaaatcaaaaaagtgagcgccgcttacccggtgcttggcatttgcctcggacaccagctattggcactcgcttacggggcaaagacgaaaaagctgccgttcggccacaggggcggcaaccacccggttaaagatttaaagacaggcaaagtgttgatgacggcccaaaaccatggctatgttgtcgatgaagcatcacttgccgggacggaactggaactttcctttaagaatgtgaatgacggcacggttgaaggctgcatccatccggacttgccggttttctccgtccagttccacccggaagcgcatccggggccgcgtgattccgaatacatttttgaccagtttttacaacgagtacaacaaagagcgggagttttgtcttatgccattcaataaatcgatcaaaaaagtgcttgtgatcggctccggcccgattgtcatcggccaggccgccgaatttgattatgcggggacgcagagctgcctcgccttgaaagaagaagggattgaggtcgtgcttgtcaacagcaatccggcaacgatcatgacagatgaagaaatggccgaccggatttattttgaccccctgacggtggagtcgatagaacagattttacaaaaagagcgtccggacggcattatcgggacattgggcgggcagaccggcctgaatctcgccgtccagctctatgaagcggggattctcgataagtacggggtacaattgctcgggacgccggtggaatcgatccagaagggggaagaccgcgaaaaattccgccagttgatgcttgatatcggggaaccgatcccgcagtcaaaaattgtggaaaatatggaggacgggctggcgtttgcgaaaaaaatcggctatcccgtcattatccgccccgcctatacgcttggcggctccggcgggggatttgcggccaatgacaaggaactgcgggaagtgctgcagcgcggccttgacctgagcccgatccaccaggtgctgcttgaaaaaagcatcaaaggctggaaagaaattgaatacgaagtcgtgcgcgatgcaaacgacacgtgcatcattgtctgcaatatggaaaatatcgatcccgtcggggtgcacacgggcgactcgattgtggtcgcgccatcgcagactttatcggatgtgcagtaccagctgctccgggacgcttctttaaaagtgatccgcgcgctcggggtgatcggcgggtgcaacatccagttcgcgctcgatccgtgttccgaccagtacaatattattgaagtcaatccgcgcgtcagccggtcatccgccctggcttcgaaagcaaccggttacccgatcgcccgcattgcgacgaaatgcgcaatcggctatcatctggatgaaattttaaacccggtaaccggcaacacgtttgcctccttcgaaccggcccttgattatgttgtcgtaaaaattccgcgctttccgtttgacaaatttacggaagcggaccggaaacttggcacgcaaatgaaggcgaccggcgaagcgatggcgatcgaccgcacatttgaaggggcgcttaacaaagggatccgttcgcttgaactcgggctttcaggccttttctatccggcgcttgccgaaaaacagccggatgatttggtcccgcttttgacggaagcgaccgatatccgcctgtttgcggtggcagaagcgatgcgcaaaggcatggcgctttctgacattgaaaaatacacggaaatcgaccgctggtttcttgaaaaaataaaaaatattgtggatatggaagaaacatgtaaacaatatacgatcgatgccataccggatgctttgctgcgcgcagctaaaaaaatgaacatcagtgatgagtgtctttcggcattatgcggatgcagcgaaaaagcggtgcgcgaaaaaagaaaacaactcgggcttgtgccggtttataaacttgtcgacacctgtgccgccgagtttgaggcgcaaacgccgtactactattccacctggggcggccgggatgaagtggaagtgtcaaaccgcccgaaagtgctgatcatcggttccggcccgatccgcatcgggcaggggattgaatttgattactgctcggtccatgccgttatggcgctcaaacaacttggctatgaaacgattgtcgtaaacaacaatccggagacggtcagcactgatttttcaatggcggataaattgtattttgacccgctgcgcccggaagatttgctgcatattattgaaaaagagcaggtggccggcgtcttcacgcaattcggcggccagaccgcgatcaatgtcgcatcgagccttgaagcggaaggcgtgaaactgtttggaacgaacgtggaacaaatcgaccagcttgaggatcgcaaccttttttacaagctgctggatgagcttggcattccgcatattaaagggcataccgcctatgatgcagaagaactgaaacgggcagcaaaagacctttcgtttccggtgcttgtccgcccgtcctatgttattggcggacagtcaatgttcattttttaccacgaagacgaactcaacgcttatgctggtgcgttgaagtacgcaagcgaaaaaagctggccgcttatgattgaccagtatttgccgggtacggaatgcgaactcgactgcatttgtgacggggagaaggtgctcatcccgggcatttttgaacatattgaaaaagcgggcgtccactccggcgacagcatggccgtttatccgccccggcacttaggaccgtctgtgcaggaaacgcttatccggtatgccgaaaaaatctgtttaaagggcaaaatcaaaggcattgccaatatccagtttttaatttatgaagggaccgtttacgtgctggaagtgaatccgcgtgcttcaagaaccgtcccaattttaagcaaagtcaccggcattccgatgattgatctcgccattgccgtacaactcggaaaaccgcttgcggaaaaagggcttcctgcaccgccggaacttgtcgccgtgaaggcaccggtattttcctatataaaactgaaagatgtcgaccctgttttagggcctgaaatgaaatcaacaggcgaggtgcttggccttgcccggacattcggggaagcactcgaaaaaacgcttctgtccgtccatgacccggtgtttgagccgccgcttgaagaacaatttgtattttgctcggtgacggaccgcgaaaaagcagccgcgctcccggtattgaaaacactggcggacagaggctaccggattgccgcaacggaacatacggcccggttcctggcgaaaaacggcgtggcggcggaaacagtgacctttaaggatgcccccgcctttttcgaacagcaacccgtgaccgctgcggtggtcatcccgacaaaagggcgggaccaaagaaggggcggcagcaagctgcgtgaagcagcgatgcgtttccatattccgctgtttacctgtctggatacattggaagccattacccgctatgccacagggacaacgccaaaagtggccccgcttcacgattttaaccgtataaaagcagaagtttagcagaaaggaagatacagatggcgacattggcccgtacgaaaaagaaagattttttaacaatcggcgcgctgcaggaagaggagctgaacgatctgctccaggaagcggccgctttaaaaaaagcgcataaagaagggaaggagaccccgtacttaaaagggaaagtgctcggtatgatttttgaaaaatcatccacgcgcacccgggtttcatttgaagccggcatgctccagctcggcggccacgctcttttcctcagttcaagggatattcagctcgggcgcggtgagacgatccatgacacggcaaaagtgttgtcgcgttatgtcgactgcctgatgatccgcacattcgcgcacgaaaccatcgaatcttttgcgcgccacgcagatgtccctgtgatcaacgggctgaccgatctgcaccatccgacccaggttttggccgatttgctgaccattcaggaatataaaggacaactggccgggctcaaaatctgctacctcggggacggcaataacaatatgtgccactcattgctcgagggggcggcaaaggcgggtatgcatatgtccgtcgctgccccggaaggctatttgccgaatgccggcattcttgccggggctcaaaaagaagcggccaaaaaaggggtctgtattgaaatgggccaaaacccggaagaaatgatccggaatgccgatgtggtcatcaccgatgtgtgggcgagcatggggcaggaagacgaaacgaagaaacggctcgaagatttacaagattatcaggtaaatgaatcattatgcaaactggcaaaaaaagattttcttttcctccattgcctgcccgcccaccgcggcgaagaagtcacggaggcggtcattgacggcccgcattccgcggtttttgacgaggcggagaaccggctccatgcccataaagccattttaaaaaaactactggaaaatttttaatgaatccgatataatgggtgtataaaaattcaacttcaatattaattatacaaagaggcagggagagagaaatggcaaaggaaaaaattgtattggcctactcaggcggtttggatacatccgtatcgattaaatggattcaggaaaaatacggctatgatgttattgcgcttggcattgacgtcggcgaaggcaaagatttaaatgcaatccgccagaaagcgctgaatgtcggtgcaatcaaagctgtgatcatagacgggaaagaaatgcttgcaaaagattatatattgccggcattaaaggcaaatgcgctctatgaaggaaaatatccgctgtcttctgcgatcagccgcccgcttatttcaaagcttttggtagatgtcgcggaacaggaaggcgccgttgccgtggcgcacggctgtaccggaaaagggaacgaccaggtccgttttgaagtgtccgttcaggcgctgaacccgaacctgaaagtcgttgcgcctgtccgtgaatggggcatgacccgcgatgaagaaattgcatatgcggagaaaaacaatattccgattccggtagacttagataatccgttttcgattgatgccaatatatggggaagagcgtgcgaagccggcgtccttgaaaatccttggaacgaagcgccggaagcagcattcgactggactgcgccgatcgaaatgacgccggatgagccagaatatattgaaattacgtttgaaaaaggcgtcccggttgccttaaacggcaaagcgatgggcctcgtccaaatgatcgaagagctgaacctgacagccggcaaacatggcatcggcagaatcgaccatattgaaaaccgccttgtcgggatcaaatcgcgcgaagtatacgaaaaccctgctgcagtcgtgctgatcaatgcccataaagaactggaatttttaacgctgccacgtgaagtgacacaatttaaaacaacggtggaacagcagttgaccaaaatcatttatgaagggctctggtattcgccgttaaaggccgcgctcgatgcgtttgtcgaggaaacacagaaaacggtcaccggcacggtccgcgtgaaactgtttaaaggcacccacacggtagtggcaagaaaatccccatacagcctgtataatgaagaactggcgacctatttgaaaggcgattcgtttgaccataatgctgcagtcggcttcatcaaactgtgggggctgccgacaaaagtatttgccgaaatccaggaaaacgggaaagtgttaaatcaataagccatttggccgttgtttctgatgttaaatcataagcacggcaaatttcaaggttggaaccggcccgttcaggtatttttcacctgtttaccgggccgggagaaaacggtaaaatatccggaaggctgtggcggtttgccgtgcagccttcattttttaattctattgcagcaggaggaaatgacattgtcaaagctttggggcggacgttttacaaaggaaacgaatcagcttgttgaaacctatacagcttcgatcggatatgaccaaaggcttgcttttgaagatattgaagggagccttgcccatgtccaaatgcttggcgaatgcggcattttgcctgagaacgatgtggaacagatcaaagcagggcttcggaaaattgccgaaaaaattaaaaacggggaagcagcatttacagttgagaatgaagatatccatatgaatatcgaaaaaatgctgatggatgaaatcggccctgccggcgggaagctgcatacagggcggagccggaatgaccaggttgcgaccgatatgcacctgtatgtccggaaaacgacaaaagaaatgatccgcctgattgcgctcgtccaggaagccatcgtgacgaaagcaaaagaaaacaaagaaacgatgatgcccggttacacccatctgcaacgggcgcagccggtgttgtttgcccaccatcttctcgcttatttttggatgctggaacgtgataaagagagattttcagacagcttaaagcggacggactggctgccgctcggtgccggggcgcttgccgggacgacttttccgattgacagggaacggacgcgcgaactgctcggattttcccgcatttatccgaacagcctggatgctgtcagcgaccgcgactttgtgcttgaatttttggcaaatgccgccattctgatgacgcatatttcccgtttgtcggaagaactggtgctatggtcgagccaggaattccagtttatcgagctggatgattctttttgcacggggtcaagcattatgccgcaaaagaaaaatccggatgtccccgaacttttgcgcgggaaaacgggaagggtgttcgggaacctcatcgggctgttgaccgtcctgaaagggttgccgcttgcctataataaagacatgcaggaagataaagaaggcatttttgatacggctgatacgcttcaaggggcgcttaagctgcttgcgccgatgattgaaacgatgaaagtgaaccgggagaagatgttccgggctgtctcgaacgattacgcgaatgcaaccgatattgccgattatttggcaaaaaaagggctgccgttccgtgaggcgcatgcggtgatcgggcagattgtcctttatggcattcagcacggcaagtatttgcttgacctgacactggatgaatatcagtcgttcagctcgctttttgaagccgatatttttgaagtgctgaaaccggaacatgttgtcaaaatgcggaacagcgccgggggaacaggccatgcacaagtggcggcacagcttcagatggcggaaaaacaactccgcacaccggattgaacaagcggctctttgatacatgcaagcgtggctgcgggatcaaaagcacaagaagcgggcgttcttaaacaatcgcccggctttttaaccgggccggatccttcgcttccaacctgtaactgtatgataacagctcccgggatgccggaaattgtggtataataaatgattataaacgcattttatgctgatgcatcctggaacaggcacacaaagccttgaggccgggaaattgggaggagaagcttttggttgacactgcaagacgcatgaaccagttaccgacgttgattttcaatgagcttttggcgtacaaaaagaaaaaaataaaagaaggcagccggatgattgacttaagcatcgggagcccggatcaggcgccgcctgcttttgtaatggaagaaatggcccaaaatgcagccgacccgcgccaatatgggtatacgatttccgggatcggggctttctaccaggcggcggcccgttattacgaacagttcggggtgaaactggatcctgaacacgagatcattcagcttgcgggttcccaggacggcattatccatcttccgctcgtattttgcaaccccggtgatatcattcttgttccggatcccggttatacagcctatgaatcaggggtgaaactggcggaagccgtgccttacccgatgccgcttctggaagagaacggttttatgccggatttgtcaaaaattccggaagaggtcgcgaaaaaagcgaaaatgatgatgctgaattttccgggcaacccgattccggtgcttgctgagaaaaaattttttgaagaggtcgtccggttcgcaaaacaatatgatctcgtggtcgtccacgattttgcctattgcgaactcgtctttaacgggaaaaagccggtcagtttcctgtccgtcgccggggcaaaagatgtgggggttgaatttaattccttatcgaaaagctttaacttggctggggcacggatcggttttctggcagggaaccgggaagtgatccggctgtttgcccaaatgaaatcgcatatggattacggcatttttgaaccggtccaaagggcggctgccgctgctttggcaaacggcagggaattcgcacgccggaatgctgcgctgtatgagaaaagaagggatttgtttgtttccggattatcccggatcggctgggaaatccgcccgtctgatgccacgatgtttttgtgggccaaaatccccgaaggcaaaaagtccctcgcttttacatatgaactgatggacaaagccggcgttgtggtcacgcccggcaacgcctttggcccccacggcgaaggatatgtcagaatcgcgcttgtacaggatgaagaaaggctcatggaagctgtccgccgcattgaaaaaagcggcgtgcatatgccgaaaaaagcgggactcctttaaggggcccgctttttgcatgtggtggcggataagccggctgtcaatgaatattatgcgaaaagattcacataaatgtgtgaaaattttccgggttccctgaagtatgtgtaaaattttactcgaaggggcaaatgagtggaaaaaaatgggaagacactctatcatctaaatgtacaccttgaatgaacatctagagagaggtcttcccatggatattcaatgggacattgagagaagcctatctgaaacaccgttcaagaagcgagagaaagcaacggaacttgaaacaatccatcaggatgtctcaactactcaagcagcctgtacgcccgtcagtgggcgtaaagcacggatcagttgccctgcattcaagcagttcatcggcaatgggacatttaagcaaaatattagagctttcattttaagcctggctcagtggggactgatcgttgaggcgcgcgaaatttacgagactcctgcgggaaaagcgagccaggagagaccccgcagcgaggtacgagcgaggaggctcgccggccgcccgcggaaagcgagtgaatttcgcgcgcctcaacatccccgttgtccatctttatacggaaatatcacatcttttccgaaaattacaccgagcaagtgaagcacggtagccgaaagtgtacaaaaagagtgtcttggaatacccgatatttaaaccttgtcgagaaaaacttgacacataccggcgttccgtctgtttagatttttttgctccggtatggtaagattaacaatgtccaaacaggtataatggcagccggctccggggccgtcccgtgccgggtaaaaagaatttcaggaaaaaggcagatgagggttcaagcgatgagcaaatttaatgatgattatatgattacaatggatgatatcgtcagggaaggcgacccgattttaagaaaagtgctggatgaggtgaacatgccgccaactgaggaagacaaagcagaactgcgctgcatgctccagtttttaaaaaacagccaggatccggagattgccagcaaatacaatttgcgtgcaggcgtcggattgtccgcaaatcagatcggcctcaataaaagaatgtttgccgtttatattgcggatgaagacggggaaaaggcgtacacggtttttaatccaaaactggtcagccattcggtatcgatgatctaccttccgcaaggggaaggctgcctgtcggttgaccggaaagtggacggttttgtgccgcgttatgaacggattaaagtcagggcatacgatttggacgggaatgaagtgctcattaaattaaagggctatcccgcgattgtgtttcagcatgagatggaccacttgaacgggattatgttctatgaccatattaacaaggacaatccgttcgtgcttcctgcaaacacggatatccggagcttgtatgaataaacagcttgcgcaaacggcagcctgcacggctgccgtttgatgcattattctcttgtgcggaaataagcattcagctggccgcgaatgacttgttcgcgcatcgtacgttcattgtattttttctctttaatatattctttgcggatttccgcagtctggatgccttcttcgcgtttgttggcgatgtccatcaggcgttcgacatcggtaaacgaatatttccggatgcctctgtttgtccgttccgggaaaatcaattttctttcttcatagtagcggattcttctttcacttaagccggttagttcacataccgttccgatcgagatgactttcttttccaagtatgattcattcgctgccacctgtgtatcctccctttgtaaggtgtttttattaatatataccaaaaaagccgttaagaccatctttctgtaagaaatcctgacaagtatttgcgcatttttcgccggcacgtgagattacataacagcagtcctttgatgtccattgggttgtcccaaagcggagttgagttctttccaatttaaccatataataattcaagactggtttctctgcaggaatggcggctgcccgcggccggctttaaagcgggaccggcatttgcccgtgcacttaccccggccggccggggtaagtgcatacaggaaagaacggaaggcggtgaatgctgccactgtaaccgaaaggggagtagcacagatgaaatcatcccggctcatttttgcagcaatcgtattgattgttatgttgctcgccttaaatgagtatctgacccataaagaattggcaaaaaaatccgcgcaaaacaacgctgctgccaaaaaactgctcgatgtgccgcttatcaggcaaatggatgcgccccgcctttacaacggctgcgaagtgacaagcctcgcgatgctgcttgccgataacggctttcatgtgaccaaaaatcaactggcggaagaaatcaaatatgtgccgtttacctataaaaacgggcagcacggcaatccgaatgcgggttttgtcgggaacatggaggacggtcccgggtatggcgtataccacggccctgtttttgaactggccaaaaaatatgccggcacaagagcggcggatttaacgggacagcctttttcaaaaatcctagaaaatgtcggggaagggcatgctgtctgggtggttactacagcccggtttcagccggtttctgatttcaaaacatgggacacgccccagggcaaaataaacatcacatacagcgaacacagcgttgtcatcacggggtacgatactggccatatttatgtgaatgacccgtatggaacaaaaaataagccgcttaaccgtaaagtatttgagaaagcgtggaagcagatgggcagccaggctattgtgatccggtgaacaaaaacccggcggaaaacgagtttcaagaattgttggattgccctgtaaagcgctgcagcatgccgcccgtgaatgcatgtttgtatagggcctggcatttccggttatattatccaaaaatggcctttgtacgtgcgtgttgcgttcaaacattggaaggaaaggcgattttctttattttaattccatggctgtctgcgctttcctttataattctttaagactgtaataaaatcaaagtaaaggcaggtgcagagtatggacgggaaaaagatggccggggagaaagcggcagaactcatagaagattaaatgattgtcgggcttgggaccggctcaaccgtttattacacgataaaaaaattaggggaacgggtgcaaagcggcctgcacatcaccggggtgcccacctcgcatgcgacggcaaaacttgcgcgcgaatgcggcattccaatagcagacttgaacgacacggcgcaaatggatgtgaccattgacggtgccgacgaggtggacccttccttagacggcattaaaggcggcggcggggcgttgttgtttgaaaagctggtggcaaaggcgtcaaaaagaaatatctgggtggtggattcccggaaaatggttcaaaaacttggcgcttttccgctgccggtggaagtggtcccgttcggatacaagcatttggtgaaaacgtttgagcgggaaggattaaaccctgtcctccggatgaaagaaggccggccgtatgtaacagacggcggccactatatcgtggatatccgtctccaaacgcctgatatcggtgcgtttggagcctggctggacagcataacaggcgttgtagagcacgggctttttctcggcatttgcgatcttgttgtcatcgggaaaggaggcaaggtatatacccggaaccgggcggaggcaaagaacgttactttgtgaaaaacatccgtatgggagaccatacagaaaattgaatttcggaggaagattgatgtatcgtttattaacgcataatgacctggacgggcttggctgcgggattcttgccaggcttgcattcggcaaagacattgaaatccagtataattccatatccggtttaaatccccaggtggaagcttttttaaaaaaagaacataaagaagacatgctgtggattaccgatttatcggtcaatgaaaaaaatgcggagctcctcgatgcctatgccgcacagggcggaaaagtgaaactgattgaccaccataaaagcgcgcttcacttaaatgagcatgaatgggcttctgtccgggtggaggaagacggcaaacaggcaagcgctacttctttgttttaccggtatctgcaagcggaaggaaaaatcagcccgaccggcgccattgacgcgtttgtcgaacttgtccggcaaatggatacatgggaatgggaacgcaacgggaatatgcaggccaaaaaattaaatgatcttttttacctgtatccgatcgaagagtttgaagagattttgctacataaacttagcggcagtgaaactttttcatttgatgatctggaagaaaagatcctcgatctggaagagaaaaaaatcgaaaggtatatcaatggaaagaagcgggaagtctaccaggccgtgattgacggttattatgcaggagttatccatgccgattcgcaccattccgaattggggaatgccattgcaaaagaatacccgcatctcgattatatcgccatttgcatggtcggaaagaaacggatcagtttcaggacgattcatgaccatattgacgtatcggaaattgccaaaaaatacgacgggggcgggcataaaaaagcatcgggggctgtgctgacggaagaggcgttccggcagtttgtcatcgaaacgtttaaaacggaaccgcttaaacgcgattttccccataaccagtccaatatcaaagggcaggaagcgggatgtttataccaaaaccgcagcggggaacctatctttatttataaagacgcccaaaaaggctgggagatcgaagcaagaggcttaaagcagtctccttctttttccgcctttgaagaagcggaaaaatttgtaaagcgccagttccaggcgtggcttgcccacgatgatgcgtatttggaatatatggacaaaaagaaaaaaagaagcgaaagcggtttgtaaagctgcccgggtgatgccgggcttttttttcgtgctgggagcgccggttgcatgcaaatttgcacgcaggatgaagcgcgtccttcacttagcaagtttgccggggaagaaaggggcttaaaaaaggcacatccgcgtttggatgcgcctttttccttaatatacaagtgagaacaacccgttgatatgggccaggtaacggatattgcttgcttccttcatggcggaagccgggaagccttttaattgcgtttggttttccccgataaacgcaatggcatcttttctgccgaggcttgcaagcgtaccggagttgaccggctggaatgtttgcattttcccgccttttaaataagcataaagattatagccgatcaattcgcccatttgccatgacatttgtgctgttggcggataagggcgtgcgccttctgatgggaagacaaccgcgctgtcgcctgcaacaaacacatccgggtgggaagtggattgcaaataggcgtttaccgttgcacgcccgcggtttacttcaatcccggaatttgcaacgacacggtttccttgcacgccgcccgtccagataagcgtcttcgtttcgattttctggccgtcttttaattccacgacattgtcctggaatttcgtaacagggatgcctgtgaaaaattgcacgccgcgcgcttccaagctcttcgttgcccgttcaatcagatttggcgcgaagttcggcaaaatggaaggcgccgcttcgacacaaataagcgagatttcggaagggtcgatcgcaaattttttcgaccaccccggaaccttgtccgccagctcgccaaccagttcaatcccggtcaggccgccgccgccgacaacaaatgtggcatccgctttgtttttcgttttggcatactgctcaaggcaggactcgatatgggcatgaatgcgtttcgcatcgtccactgattttaacagaaagctgttttcttcaaggcccggaataccgaagaaagctgtttcgctgccgagcgccacaacgagcacatcgtaattcagcttaaagccgcttccaagtgatacttctttcgaatcaggcgagatttttgtgacttcatccacctgaacgtcgacatctttgcctttaaacagttttctgagcggaagcgacacccgtttttcagaaacgtcgcccgccgccagacggtgcagttccgtaataatttgatggtccggcacacggtttacgactgtgatcgctgcatcgtcttttgacaaatattcacgcgctgataacgcagataacaggccgccgtaaccggcccctaaaatgacaatttttttactcatatggatcccccgttttcattagttctcattcaccttactgctgtttgctgcgttcttccgcgactgcaagataagactgcagaaaacggaacagcttctgggcttgcggatctttcagcaatcttaacaggccgaacaatccgatcgtgtctgtggacgtctcggcacggtcctttgcttcaatcgcggtttgggcaagcccttttgctttctcggcaacgggatccagaaaaccttgaaatccgcctttaaaatcattgatcagcactttatctgtcattatggattgcgcaaaatcataggttttgtttaaaattgtgaccagttcggccattttcggcaggctttcaaccaacaccgtcaaagattgctggatttccggattcaataattgatccagcaaatctttctgtgcgactgccgtttccggggttacttctggtttttcttcaggattgcctttttgagctgaagtttctgccatctcctatttctccttttctgatggaattcccacacatatgtagatacaaaaaatatacaggttccctgatcccccctttctgtttgtgaatttcctcccataattacgcatactaagattcacaaagaaaggtgatgaaacctcatatatgattagtatatcaaattttcactgtataggaagtaattttctttccaatttcggggaaaatccgcatgcaagcttattttttgtcccggcttcccgggttatgcatagcaaaatattttgcttgcatttcttccattgctgttgtaagataattaaaaatactgaacgcgaacgaaggaatagtaggcggatcacccctgcgcaagagagcggcgcccacaggctgaaaggtgctgcagcaggcggcctgccaaacctgccttccgggtcccggaaaaccgggcgcaaagctttgcgttatcaaaaaagagcggggcgcaagtgtgtcgcccaaaaaaggtggtaccgcgaaaagcaaggccttttcgtcctttttacagggacgggaaggcctttttgtttacccttttagaaggagagaaatgccatggagaaaaacagagtcgtagtaaaaatcggaagcagttctttaacaaatgacgcgggggaaattgatgaacagaagtttgccgaccatatcggcgcccttgcggcattgcgcagagccgggcatgaggtggtcgtcgtttcatccggcgctgtcgcgtgcgggttccggctgctcggttacccggcgcggcccgtcacgttaaaagggaagcaggctgctgctgccatcggccagagtgtgctcatccagcggtacagggaagcgcttggtggttacggcttaataccggcgcaaattttgttaacccggaaagacttttccacaaaagaccggtaccataacgcttattcaacgataacagagcttttgcgccgcggcgtcatcccggttatcaatgaaaatgattccgtatcggtctcagaactcactttcggcgacaatgacatgctgtctgcgctcgtcagcgggcttgtccacgccgggtacctcattattttaacggatgtaaacgggctgtacagtacaaatccaaaatacgaccgttgtgcacggcgcattgattttatcgataacatcacgcccgagatgatgaaaatggctggaggcgccggttcgaaagcgggaaccggcggcatgctgtcaaagttgaaagccgcaaatacagcggtatccctcggcgtccgggtgtttatcggtacgggaaaaggacgcggtaaactcgtcaagatactcgaaggaaaaggggacggcacgtatatcggagccgcccgcccggctgtaaagagccggaaacaatggatcgcgctgttttcggaaagtgccggaaaaatatacattgaccgcggcgcggaacaggctttgctgcaaaaagggagcagcctgcttccggcaggcattcaaaaaatttccggaacattccaaaaaggcgatgtcgtggacgtctacggcgcaaaagggctgcttggaaaaggggaagtgctttacggtgcggatgagttgttgcacgtgctcatgaagcctggcgggcgggcagcagaagaagtcatccaccgcgatcactgggtgcctttaaacagaaaggggctgggttaaatgtctgaagccgcagaaaaaggaaaaaaagcgaagaatatcagcatggcgcttgccaaaaagacaacggaagaaaaaaacaaagcgcttttggcggttgcccgtgttttgcttgaggaccgggaaacgatcatttccgaaaacaaaaaagacctcaggagcgggagccgggcgggccttccggaaaatatacttgacaggatgatgcttaacgagaagcggatccatgatatgtcagaagcggtccggctgcttgtgaagttaaaagatccggtcggggaaacagtcgaagaaatcaagaaagaaaacgggttgctgatcctcaaaaagaaagtgccggtcggtgtcatcggcatgatttacgaagcgcgcccgaatgttacggccgatgctgccacgcttgcgatcaaaacgggcaatgcagtcattttaaggggcagctcgtcttccatctgctcaaatcaggcgctcgtctcttccattcaccgcgcattggcggagacaggctttcctgaagatgccgttcagctcatcgaagatacaggcagggaggcggcaacagaaatgttccacctgcgcgattatctcgatgtgctgatcccgagaggagggaaaaagctgattgataccgttgtccgcgaagcttccgtgccggtgattgaaaccggggcaggcaattgccatttatatatagacgaaacagcacagccggaaatggccgtccggattgcagtcaatgcaaaaacgcagcgcccatccgtctgcaatgccatcgaaacgcttttaatccatgcgcagtggctcgcccgacacggcgaaaagctgcttagcgcactggcggaaaaaggggtggagatttacggggatgagccggtgcagaaaatttttccggctgcaaaaaaggcggcggaagaggattggtattgcgaatacctcgcgcttaaaatcagcgtcaaaacggtcgaagatacagatgaagcgatccggcacatcaaccgttacggcacaaaacattcagaggcgattgtaacagaagacggggcccgggcggaacatttcatgtccatggtggatgccgcctgtgtgtaccataatgcgtccacccgttttacagacggttttgagtttggatacggggcggaaatcggcatcagcactcagaaactgcatgcccgcggtccgatggggctggatgccttaacctccacaaaatattggatttacgggagcgggcaaatcagggaatgaatacaaaacggcgcggccaaatggccgcgccgttttgttcaaatgctccgggcaatcgtttggttaaaaaaacattccacataaccctgccgcaatgccgaccacaacacaggaggcggcaacaaacagaaggatttgttttgaaaacgaccggccaaccatgatcaaggaaggaaggctgacggccggaagcgtcacaagcagtgcgctggccgggcctgtcccgagcccgaaagccatcatcgtctggacaatcggaatttcagccgctgtcgggatgacaaacagcatgccggcaaatgcaagcaggatcaccgccgtgatgctgtttccggcatgctggccgaatgccggaaacagccagaaacgggccgcgcttaacacaacaaccgagagcaaataagccggaacaagatacaggatcatatttccggcggcctttccccatctcaggaaaaaggacccgttgttttctccggcatccggcccgaactggcggatgtccaccggttgttcatttttcacgagccggcccgccagccagctgaccccgaacgtcatgataagccccgccacgatgcggagaagggtaaatttccatgacaagacaaaagccatgaaaatcagcgttgccggattcaacatcgggttgccaatccaaaaggcgagtgccgcaggtgtggacgcttgttttttgcgcagcccgactgcaatcggcgcagcacagcatgtgcacatcatgccgggaatggcgctcgcaccggcaataaccgtacttccgaatgacgttttgccgagcactttaagtagccacgcagaaggcaggagcacctgcacgagcgaaccaagcaaaatgccgagcacggccgctttccaaacagcctgaaaatacgcggtcacatattggaaagtgccatcccatgaaaatgatgccgatttgcccggatccccgagaatcgatgtaccgatggagtgcgtatgggcggcaagcaaagatttctcatagtacggccaccattttacataaaaaaggcctaatccggcaataacgagaaacaaaacggcaagccaagccgcctttttcccggattgctgttcaggttttgctgtatgatttacaacagccacagcaacaacatctccatttctattacagtagaattataccaatttttaatgataacataataagctaaaaaaataaatggtgggtgcaagccaatggcctgtctcttatttggcatggggctgctgcgctttttccggttcgcccgtgaaaaatttctgccgggaaaaaacccccggttaaaaccgggggcagggtcaatcattttttgcccgggttaaaatgtcgatcagcttgtctttgttcgggtaatcagaagcttcaaatagcctgatcgtcttttgcacatcgtaggaaacgcggacattggaaacctggtaatcgtgatcgccaatttccaccatcgcataagaggctttggcgatcccgtcaaacggcaggccgacactgccgagattgacaaacgttttgccatcaaacgtgcggataaacggcaggtggatgtgcgcatataaataaatatccgcgtcttcctgcatcaacttctctttcaacttgctgttttcgctatccggtgacacattttcaaacaaactgtacggggtggcgtgaaatccgtgaattttaatgccgccgtattcatattttaccttttcgggaagctggtgcagcgactccactgcattttgttccatccgggaaaccgtccagtcccgctcccggttcatcatttcataagccttttccggcacttcgttcatgccgacgcccctgtacacccattcatcggcattccctttaatcacttccgtttttaaagccgtcaccatctcatatgcccgctgcggttccgggccgcgaaagcaaagatcgccgaggacaaaaattttatcggcccgcttttgttcaatatcttccagcacggcttcaagcgcatgcgcattgccgtggatatcggatataaatgccagtttcaatgcgatcacctcaaaaattggtttcctttattataccataacgggttgcgggtttatcccggcctgcctggtttcaccactgaggcccgttttcagcgccctctgcaggcgggcggagcgggagaaaatgcaatttgccgcgaagtggtctataatggtacaaggatcagacatgctttaagaaaggtcaggttgatgcaatatggcacaatcagaaaaaataaaattgacttcactgacgacaaagggcggatgcggatgcaaaatcggcccggcggatttgcagcaggtgatgcggacgctgccaccgagagtccaggatccaaatttgctggtcgggcttgatacgaacgatgatgccggcgtttacaagctgacagatgatttggcgatcgtgcagacagtcgacttctttacaccgattgtcgatgacccttatgcattcggccaggtggcggcggcaaacgcggtcagcgatatttatgcaatgggcggcacgccgctgactgcgctgaatattgttgcttttccgatccataccctcgacaaagccattcttgccgatatattaaaaggcgccggtgacaagtgcaaagaagcgggggtaactttagccggcgggcattcgattgatgaccaggaacccaaattcgggatggcggtgaccggcacgatccacccggcaaatatccgcacaaatgcaggggcaaagccgggggacaagctaattttgacgaaaccgatcggggtcgggattttgaccacttccattaaacgggatttgttaacagaagaagaaatcacacgcgtgaccaatgtcatggctaccttaaataagaaagcggctgaaatttcccgggattacaccatccatgcttcgaccgatgtgaccgggttcgggcttttgggccatgcatccgaaatggcgcagggaagcaaggcagggctccgtatttacaaagacaaagtgccggtgctgccgcgcgtgcgtgaactggcggaagcgggcgctgttccgggcggcacaaaaaataattttgcccatattgaaaatgtcgtcgacttccctgaaggtatggaccaaatagataaatggattttaagtgatgcggtcacatcaggcggccttttgctttccgttgccggcgatgaagcggaacagctgcttgaagaacttgtaaaatcaggggtggaagccagcctgatcggcgaggttatcccggaacatcccggccgtatcaaagtgcaatagtcccatcaggaaccattagaaaggcgggaaatatttgtttcaagacattaccattgaagaagcaagaaaacggatggagaaaaagcagctcacatgggtggatgtccgttccccttccgaataccggaacgcgagcatcccggggagcgtgaatattcctttatttaatgatgaagaacgggcggaagtggggacaatttatgcccaagccggcaaccgcgctgcgaaagaacgcgggcttgaaattttttcgaaaaagttgcccggttttatcgaggctttccgtgaaatagaaggggaaaaggcggtattttgctggcgcggcggtatgcggagcaaaacggcagcaaccgttttggatctgatggatattcatgcctaccggctccaggggggctaccgcgcctaccggaaatgggtgacgggactgcttgaaaatatagactttcatccggttacgtatgtgctgggcggctatacaggcaccggcaaaacgtatatgctccgggcgcttgcttcggaaggctatccggtgattgacctggaaggcatggccaatcaccgcggcagtattttcggggatatcggccttagcgcccataaccagaaaacgttcgatgctttgctggcagagcgcattttacaattgaaaaatgcgccgtatgtgctgatggaagcggaaagcaaaagaatcggaaaaatcgtggtgccggaatttttgatggagaacaaagcgcgcggcatgaagattatgattgaactgccggtggaagaacgggtccgcaatattttggatgattaccggccgtgggagaacaaagaagcatgcatccgtgcctttcaaagcatcaaagaacggattcacacgccagttgcaaaagaaatcgagaaagatttacagacggaacggtaccatgaggccgtaaaatggctgctcgaatattattatgatccaagatatgaccattcgctcggaatagaggagacagaaagggtgaaaacgatccgcgccggacataccgatgaagcgctcggccaattaaaagaaatgttaaaaacagccggccttccgttgcactgagcaatggcaggccggccgtttacatgtatcgcggcggatttatttggatagccttttggttttggcctgcgggcatgccccggtcagcaatgacaatccctgcctgccatgcccggataatagccgtgcatcattcccggggccatgcccattcccgttcccgcatacccgggataacccggcatttgtccatatccgtaactggtgcctgggtaacccggccccatcggcatccccatgtgctggccgtaccccggcatgccgtacatgcccggatacatcgaagttgcgggatgctgccccggatacatttgcccagccgtcggatattgccttgccaaaccgcctgatgctcccatctggcccatttgccccattgaaccgtaatgcatcatatccatatcatcatcataataaggctggcttccccctgtaaagcttccaaaatgccctaacccctgagattgcggataatttccatatgtttgttccatctcaacccactccttttcggtgttcaacattagagtatgtagatcagggcgcatggttatagacatttgccccaaaaggtgaaaaaaatgcgggcagaagccttatataaagattttaccggggtttaaaatatggtttgggtcaaacaggtccttgatttttttcattgtgctataagcgggtccgtgttcttcacgctgatattttgcctttccaatcccgacgccgtgttcgcccgtgcaggtgccgccctttgaaagcgcaaatgacacaatatgttcatttaaagaccgggcctgccggatttcattttcatttgccatatcgatcattaaaatgacatgatagttgccgtcgccgacaattgccccgtccatgcccattctgtcaaacgttttgcgcgtatcttcaatggcttcggggaggaaatgaatatttctactttttataatatatgaaaaataaagtgttggcaaaaccattggtcaaaaagggggcaaaactttcggcagcggaaaaaaggcaggtgcttggaagaaatgcacaaatatttacaaaagtaagcgtttgctttaaactgtatactgtgtatatttttaaaacaggcggaaaaatatagaaaaataagagggggagcggttttgaaaaggtttgaaaacagggttgcgattgttacgggtgcaagcagagggatcggcaaagcggttgcagccgcctttgccaaagaaggggcaaaggtctgtctcgttgacattcatgaaaaggcattagaagaaactgtaagggctttcaaagaaaccggttacgatgtattcgggcagccggtggatgtggcaaaccgcacgcaggtggaagcggcggtttcagctgtgcttggcaggtatggaaagattgatattcttgtcaacaatgctggcgtgatccgcgataatctgctgtttaaaatgacggacgaagactgggataccgtcatgaatgtccatttgaaaggagcgttcctcttttcaagggccgtccagcaaagcatggtcgaaaccaaatacggaagaatcattaatacctcttccacatccgcgctcggcaaccgcggccaggcaaactatgcggcggcaaaagcgggccttcagggctttacaaaaacgctggccattgaactcggaaagtttggcattaccgccaatgcggttgcgcccggctttattgaaaccgacatgacaaaagcgacggctgagcggctcggcgttaaattcgacgactttatagcatttaaccaatcgatgattcctgccggccggacaggaaagccggaagatattgcaaacgcggtccttttttttgcgatggaagaatcatcattcgtaaacggccaggtgctctatgttgccggcgggccgaaagcataaaggaggggcgggcggatgtttgaagaactgattggaaaacggtcaaacccgatcgatccatacgatcgatgaagcagcagaaaaagccggtctgcccggcatgatcgcccatgggatgtggacaatgggaaatcttggaaagctgttcacaccgtatgttggcgaagggttcatcgaaaaattcagcgtgcgttttgcgggcatggtttttccaggcgaccgcttgacactgtcggcaacgatgaaagaagcacaaggcgcccagcaaacgtatgaagcagtggcggccaatcaggacggggcaaaagtaatcaagggcgaaattgtatggagattgtacggggaataaaaaaatcccgccaggtgcggcaggattcccctgaattataattcaagccattccgtatggaagatgccttctttgtcaacacgctggtacgtgtgggcaccgaagtagtcgcgctgggcctgtaagagattggcaggcagcacttccgaacggtatgaatcatagtaggcaagcgctgcggacaaagccggcgcaggcacgccgaagcggacagctgtcgcgatgacctcgcgcagcgcatcctggtagctttcaacgatttccttgaaatacgggtcaaggagcaggtttttcagattgcggtcgcggtcgtacgcatctttgattttttgcaaaaattgcgcccggatgatgcagcccccgcggaaaatcatcgcgatttcgccgtaattcaaatcccagttatattcttccgaagcggcccgcatttgcgcaaatccctgggcgtaagaacagatcttgctcatgtacaacgcttttctgaccgcttcaatgaacgcttttttgtcccctgaaaaagcgggtttttcaggccctttcagcaatttgcttgccgctttccgttcttctttcatggccgagataaagcgggcgaatacggactccgtaatcaatggcagcggaacgccgaggtcaagcgcgctctggctcgtccatttgcctgtccctttttggccggccgtgtccaaaatgacgtcgacaagcggtttgccggtttctgggtctttttttgtaaaaatatcagcggtaatttcgattaaatagctgtcgagctcgcctttgttccagtcggcaaaaacttcatgcagttcattcgcgccaaggccgaggatatttttgagcagattgtaggactctgagatgagctccatatcgccgtattcaatgccgttatgaaccattttcacataatgaccggcaccatccggaccgatataggttgtgcacggttcaccgtttactttagcagcaatgtccttcaaaatcggtgcaacaaggtcgtatgcttctttttgcccgccaggcatgatcgaagggcctttcagcgcgccttcttcgccgcccgagacgccggtgccgataaaatggatgccgagtgcgcttaattccttattgcggcgctgtgtatctttaaagaaggtgttgccgccgtcaatcaggatatcgcctttgtcgagaaacggttttaactgctcgatcgtggcgtcggttgcttcgcccgcttttaccatcagcaggattttccgcggtttttcaagcgaattgacgaattcttccattgtaaaatatccgaaaatattttttccttctgattcttttaacatttgatcggtttttgaacgggaacggttgaaaaccgaaacggtgtaacctttgctttcaatgttccacgcaaggtttttccccatgacggccaaaccgatgacgccgatttgctgtttttccaatgtagacacctcgacatgattagattgtaaaatctttcctttgcgagcaatggctgcaagcaaaatggaagtcttacattattgtaccaaatatcccctgttattataaagaaaaagacagcccggccggaaaatatttatattttccgcaaagaagtgtgcgtgtacacgatttagatgagccgctcacgccccggaaagcgcgcctggtatgtgtaaaattttannnnnnnnnnnnnnnnnnnnnnnnnnnnnnnnnnnnnnnnnnnnnnnnnnnnnnnnnnnnnnnnnnnnnnnnnnnnnnnnnnnnnnnnnnnnnnnnnnnntggatcagttgccctgcattcaagcagttcatcggcaatgggacatttaagcaaaatattagagctttcattttaagcctggctcagtggggactgatcgttgaggcgcgcgaaagttacgagactcctgcgggaaaagcgagccaggagagaccccgcagcgaggtacgagcgaggaggctcgccggccgcccgcggaaagcgagtgaatttcgcgcgcctcaacatccccgttgtccatctttatacggaaatatcacatcttttccgaaaattacaccgagcaagtgaagcacggtagccgaaagtgtacaaaaagagtgtcttggaatacccgatatttaaaccttgtcgagaaaaacttgacacatacttccctgaaaaagaggtagacgcccgcgaataaatgcggtatgataggaatatagaatgataatcattatcaatgaacagactctatttctcgatctgtctgggaggggcataccatggtcttgaccgaactgaaacccggaagcaaaggcattattacagatttatcaagcattgatcaaagtattcaaaggcgccttcttgatttgggtgtgcttgaaggccgggaagtttgttataaatgcggattgcctttcggcgggccttgcatgcttgaagtcagcgggcagtgcatcggcatccgcaaaaaagaagcgatgcggatccacgtggagtgtttataatgcaggtcgctttatttggaaaccccaatacaggaaaaacatcactctttaatgagcttaccggatcttatgaatatgttggaaactggacaggtgtcaccgttgaaaaaaaggtgggccagctgaaggaaaatgccgggatgctgattgatttgcccggtatttatgctttgaacccgctttccaaagatgaagcggtggcatcgagattcttaattgaggaagacttcacatctgttttgaatatcgtggatgcttcccagctcgcacggaacctgcatttgaccatccaattgatggagtacggaaagccggttctgatcgggctgaatatgatagatgttgcaaaatcgcgcggcatgaaagtgaacgaccattcgcttgcagaaggcctgggcattccggtcgtgccgattattgcaaggacaggaaaaggatgcagggccatatcggaacagatgcaggaaaaggcggttgcaccggatttccgtattgattacggcgatgatttggagcatgcggcggcctatcttatggaccggctgccggatttccggtcattggacaaacgctggctagcgctccagtttttggaaggaaatgaagtgatccgccaaattccggcgtttgccaatgtaagggcggaactcgaagatttttgcgcgggcgtggagcgcaggctccgtgccgctaacccgcatacctccattaaacaggaaatgtttaaaaagcggcagcaatttattgaccggctgattgaaaccgctgttgaaaaaacggcggcagaaaagaaaacgctgacggagaaaatagatgcggtcgtcacgaataaataccttggcgtgccgatctttctcgtgatgatgtatttggtattttgcattacattcaactggctcggcacccctttgtcggattggcttgacaagtttttttcaggcccgctgacagcctggattgaagcggggctgaaagaagcgggggcaacgccgtttatccgtgatctggtgttaaacgggattgtggcaggggttggcggcgttctcgtttttgtgccgcaaatttttgttttgtttttctttatctcggtgattgaagattccgggtatatggcgcgggtatccatggtcatggacagggtcatggaatcagtcggcctgaacggaaaagcgtttattccgctgattatcggtttcggctgcaatgtgcccggcgtcatggcggcaagaacgattgaacagccgaaagagcggctgttaacgacgctgttgaccccgctcatgtcctgttctgcccggctttcggtctacagtttgtttgtcgcggcttttttccgccaccatcaggcacttattgtcctgtcgctgtatgtgctcggcattgtcgttgcgcttttgcttgcgaaagtattttcgatggtggtgaaaacggaaggctctgtttttgtcattgaactgccgccgtaccgcgtgccgaatgtgcggagcttgtacagaagcacatgggataaagggaaaggtttcgtccggaaagcagggaccttgattttcggcggcacggttgcaatttggctcctttcgaatgcgggaccgggcggattcaatgtgcctgtcgataaaagttttatggcgatcctgtgcggatggattgcgcccgtcttcaagccgctcggttttggaacatggcaggcggcggctgcacttctgaccggttttatggcaaaggaagtggtcgtttcaacgatgaacgtcctctattttgttccggacggcgcatcccttgcaggcgttatttcccatgcctttacgccgctttcggcctatagttttatggtattcattcttttatacattccatgcctttcgaccgtggccattatccataaagaaaccggctcggggaaagtgacgcttttttcgatcgtttatgcgcttgtgattgcttatttgattgcttttctgatttacaatattgggcggttcatcgctttttaaaacgggggaatgttccgatgttattcagtattttgattggtgttgtgatttttgcttatgcggcgtttacgctcatccgttttgtcaaaaaaagcagggaagggcagtgcgcttcctgtgcactgaaagaccactgcaatacagccagctgttgtgcgccggatgccccatcccgggccaaggcggcaaaaagctgaaaataccgggccgctctttaaaaggtgtgcccggtttatatataggcaggggtttcgttttggcggaaatctggcccggcgttccgtatgtgtaaaatttnnnnnnnnnnnnnnnnnnnnnnnnnnnnnnnnnnnnnnnnnnnnnnnnnnnnnnnnnnnnnnnnnnnnnnnnnnnnnnnnnnnnnnnnnnnnnnnnnnnngaaaaacttgacacatacgcgcgcctgttgggattttttaaagcttacagtataatggataaagatgccgtttggcggtttttaagcaaaaggaggaaacgggattgggcattattttagtcgaaatatgtgaaggcagcctgatcaacacgattgatgtggaagcagaacttgaatcccggtatcctgaagttgcggtgatttcaaatgaatgcttaatggcgtgcggcttatgcacctacagcccgtttgcgatggtgaacggaaaaaggatctttgccaaaacgcctgcggcttgccttgaaaaaatcaaagcagcaattgaaacggaattaaagaatctgccgtaaatggttctcgtttcaatttgttttttatattataatgtgggatggagcattcgggatagggggatagcaggatggaaatttggactgcgttcaaatacagctgtttattgccgggaaaaagggctgctttccgcttgaacaggcttccgatggacaaggcggttttgtatgtggttctgcttgttcttgcggtttcctgtctgcatatccctgcgcttttaaccagcggatccgttagcggcctgaatgccatccaatttgttttttattttctgttcgcttatgtgctcattgtcctgtgcggcgtattggcgggcatttccctgctcgcttgcgccggatacgggctcaggaagctgtggaaaagaaaactggcctaccagcatttatggaaaatgtcatgctttgccatgacggtcccgtttattttacatacaatcattcatgaatgggttacgaaaaacggctttgtttcggctgtattgctgatcgggtatccgcttatttgtttggcggcgatgatcctccactatccggaaacaaagagtcggcatgtaagcagcaaagaaggagaagaacatggctgaaaagacaattttacaagacttgcgttcactcatttacccgcgtgaaattctggaagatgaaccgttaagcaaatatacgtttacaaaaacgggggggaaagcggatattttgatttttcccgagacatatgaggaagtgcagaagacggtccgttttgcttctctgaacggcgtgccgtatacgatcctcggcaacggctccaacctgatcatcaaagacggcggcatcagggggattgtgctgattctgactaaattagcgaaaatatcacatacaggcaatgacattacagcccagtgtggtgcagccattatcgatgtatcgcgctatgctttaaagcaaaatctgacagggcttgagttcgcctgcgggataccgggatctgtcggcggtgcgctgtatatgaatgcgggggcgtatggcggggagatcaaagacgttctgaaaagcgcgcttgtcctgaccaaaacaggcaagatgaaaaggcttgaaaaaagcgatttgtccttccagtacaggaaaagttccattgcggagaacggggagattgcgcttgaagggacgttcagcctgaagccgggcgacgcacaggagatcaaagccaaaatggatgagctgacttatctcagggaatccaagcagccgcttgaatatccgtcgtgcggtagcgtgtttaaaaggccgcccggctattttgcagggaaactgatccaggacagcgggctccaggggaaacgcatcggcggcgtcgaggtttcgaccaagcatgcaggatttatggtgaatgttggcggcggaacggcaacggattatatgaatttgatcaagtttgtccaaaaaacggtaaaggaaaaattcggggtggacctcgagacagaagtgaaaattattggggaagattaaaaaacatcccggttcttttgcgtataaaagaaccgggatgtttttcagcccttccggcggatatcggttaaccggttcccgcggtatttgatgtacacttggtcgccaatgttaaaatttaaatacgtatcgcagtcagccgtcagcgttttgccgttattaaaggcgatcgcgcaatacggtttcgttgttgttggtgccacttttattttccgcttcgttttcacaccggttgcaaccggcacttctttccggttgggcgtataaaatttatcagtaatctttacgcgctgatagcttaccgggcgctgaaaaaagagcaaccctacaagcacggccaggcagatgatgaataaaaccagtttccatttcagtttttccatttgtcatccctctactcccaaaacgtctctatgaatatatttatggggccattcattaaaatatgtatataccacaaccaaatgcttttttaaccgaatctttcttgaaactttttaaggccggtttcgtatattgattagactagtctagcagaaagcagggatgttatgagtgaaattgcgctctcggtcaaagggattacaaaacaaatccgctcgcgcaaaattgtggaccaggtcagttttgaagtgaaaaaaggcgaggttttcggccttctcggtccgaacggcgccggtaaaacaacgattatccggatgattgtttcattaatgaaacgcacaagcggagaaatctatattaacggcaaaagccttgatgaagattacaaaggcgctttgaacgaaatcggcgcgatcgttgaaaatccggagttttatccctatatgaccggctatcaaaatctcgtccactataagagaatgtcaaggaaacccatttctgaagagagattatgggaagtcgcaaagcttgtcaaactggaagatgcccttaaacaaaaagtcaaaacgtattcgttgggaatgcggcagcggctcggggtcgcccaggcgattttgcaccggccttcgttattgatccttgatgagccgacaaacggccttgacccgcaaggtatccgcgaattcaggggctatttgcgggagctggcgggaagcggggtatctgtcctcgtttcctcacaccttcttacggaaatggaattgatgtgcgaccggtatgccattatcgaaaaaggaaaactgatccatattgaaacgatggcagaaacgacaacggtgaaacaggatgaccgccgcgatatcctgtttgcaacggatgacagcgaaagcgcgaagcaggcggtagaaaaacagctccattttccggtttccattgtcgatgatacgcacattttggtttcggcagcttacaaagacgcagccgttatcaacgcaacattggtaggaaacggctgcaacgtctatgaaattcattttgaaaagaaaacgctggaagaccgtttccttgaactcacgaatcatacagcaggggaggaaagtcaatgaccgctttaattcgaaatgaatggatgaaaatatttgcccggaaaagcgcatgggtctatatgctcctgattgtagcgttcgtgctgattgctgcactgttttacaataaggtttacggcaaagacgatccaaactggcgcacgaaaatcgagaaagaaatcaaagcggatgaggcactcatgaaaaaggatcctgaacaatacgcggaccttgcgccaaccatccaaagaaagcaagattatttgaaatacaatatcaatccggatgcccattcaaactggcatttcatgaacaatgtggtcattccgcttggttcatttgtcaccttgttcagtgtaatcgtcgggagcgccaatgtctcatcggaatttgcatccggaacgataaagcaactgatgatccgcccgcatgagagatggaaaattttgctgtccaaatacattgctgtaacagcctacgcggtattactgcttgctgtcctgcttttagccggctatttgatcggcatcatttttcagggatccggcagtttccatatgaaaatggtcgaagataccttggattccagccaatataaaattaaagaaatcggtccgcagtttttcctgaaatttgccctttatctgccgagccttgtcatggtaagcgcgattgcgttcatgctttcgaccttgttcaagagccaggctctggctgtcgggatcggcatttttgccctgtttatcacaaacacactgggcgggattattctgtttctgatggaccggtaccattggctgaagttcctgattttcccgcatttggacttgtctgtttatgcgtaccaggataaacttacagatggcgtcaccttgccgttttcattaatcacgctggctgtttattatgccgtttttatggccttgaccttttggtattttcaaaaacgcgatattgcgttttgaaatagcgggcgaattcgggtaaaatggcggcaaagggccgggtgaaggagggatctgccagagcaggtctcttctttgcttttttggggcggcgcacgcatcaggctgtacaggcggcgcatagcgtgtgcacccgccgaataggataataatgggggcttgaccggaccgctggaggatgatatgggaaaaaacaaccggaaaaaaatcaatgcggccgttttgttcgttttcattgtgtatgctgcttatttaatggaacttttgttttttatcccgtaccgccatgcgcccaattctgccagccaaaatgttatcccgtttaaaacgatccggatgtatatcctttattaccgttactttcaatttgaagtctggttttccaatctgtttgggaatattttcatgtttatgccgttcgggtttatcctgcccattctttttaggcggctgagaaaggcctggataatgggattgctgtcttgcctggcatcggctttggcggaaatcattcaaggatatttccatgtcgggggttttgatgtggatgacattttgctgaatacaacgggcggattgtgcggttacggcatatttttactggtccgcaagcttgtgaaaaaaataaaaattgagatttggcgttaaatatgcataagaaaagccctgcggagataatctaacggggacccatcaatggccggcctaaaaaaaaggggggaagtgtggattggatgaagaaaaactggtccggtttttaaaccaggaactttcaaattttacagtgctttatatcaaactgcaccgttaccactggtatattcaggggaaaaacttttttacgctccatgcttattttgaagatttgtaccaggcgttttcaaaacaaatggatgtgcttgccgaaaggattttggcaatcgggggacggccgcttgcaaccatgtcgaaattcctggaccggaagacgcttgttgaagcgagcgcggataatgaagaaggcgaactgctgcagcaattaagggaggatttggcacagctggcaaaggagatccgggaaacggggattccgctggcggaagaaagaaaggacgacgccaccgtcaatctgctcacccggtttttggcccggtttgacaaggatatctggatgctggatgcgatggcggacaaacggtaaatgcccttgttttcctcaaccaggaagcagcggcaaataaaaaaacagcctttccgtttgatggaagggctgtttcactttatataaacgtatcaatcaaaaggaacaggttcaggcatacgacgaatcctgccacgatccaggagatgatgctcgttatccggtggttcaccagttcacccatgatctgtctgttactcgtgaactgaatcagcgggacaagggcaaagatgatcccgaatgagagaatgacctggcttatgacaagcgcgcttgtcgggttggtgcccagcatgataatgagaagcggcgggatcattgtgatcgcacggcgcaaataaagattgatccgtttgttgataaatccttgcatgacgacatcaccggataatgtgccgatagaggagctggaaagccctgcaatcaaaaggccgaggccgaaagagatagccgctgccgggccgatatgggtgtaaaactcgcgaaacgcgacatccagatcttccacgacaaggccgtgtttataaaatacactggacgcaatcacaagcatgctcatattgatggccccggcgatcaccattgcgatgatgatgtcgatcaattcaaatttgaaaatttttcttttttccagctcattttttccgacgattctgttttgcgtcaatgaagagtgcaaatagatggcatggggcatgacggtggcgccgagaatgccggccgccaggacaatactttggatgccgtcgaattttggcgtgacaagcccgccgagcactttcgcccattccggttttgccagaaacgtttgcaaagcaaaagcgagcacaacaatcatcacaagggcggcaattactgcctcaaatgaccggtagccgcggcgctgcaattcgagaatggcaaacgatccgactgctgtaatcaatgcggccggaagcagcggaaggccgaaaattaaatacaggcccaaagcagcgccgataaattctgccaaatctgttgcaataatgacaagctcgctttggatccataaaaatatcgacaccggttttgaaaaacggtcatgcgcaacttccggcagatttttcccggttgcaatgccgagctttgcggaaagggactggattaaaacggccattaagtttgaaaaggcaatgacccaaagcagcatatagccgtatttcgatcctgccgtaatattggtggcaaaattgccgggatcgatataagcaacgcctgcaatgaaggccgggccaaggaaaggtaaaatccgttttaacccttttacatcccctcggagcacggcttgtgcgctcgttgtattatgggacgtgcggcctggcattttttggctcatcgttttttcactcattagatgtttcccccttctttaactttaatcccgaaacaaaaaagtttccttaggaaaaactttatctgttactattgtattcaatgtttgcgaaaaagtaaaccttttgcatgcattttcccctgtattttttgtggaaaacatgctttttgatcattatgctcgatttatgtgcggttatggcttctgctccgggagagaaagcaggaggggagaaaaatgcatccttttcttgaaaactgtggtatatattaggtatagggaaaactgttttcacatcatggaaacgctaataaaaaaaggggggaattgattgaacgaggcattcattatcgaaaagttaaaaaagcgggaaccgtccgtttttgggatggaccgtttgtcccagtttgcggtcctgttgccgctcgttcaaaaaggcgatggccttcacgttttatttgaagtccggtcccggcagttaagaaaacagccgggggaaatttgttttccgggcggcaaaattgagacgacggataaaaacccgatggaagccgcgattcgggaaacaaccgaggaattgggcattgacgcgtctgtcatccgggacgtgttcccgcttgactatgtcgtttcatcatacggaaggcgtgcgatctttccgtttgcaggttttttgtcggatgcgccttttcatccgaatccgggcgaagtggaagaagtctttacggtcccgctttcacatttcgccaaaatagcaccggaatgttaccggatcgaatttaaggtggagcctgaccaggattttcctttccacttaattcagggcggcaaatcatataaatggaatagccagcaaatggacgagtatttttattactacggggagtatgtcatttggggattaaccgccggtattttgaaaaattttatggatattttgggtgcagacaaggcttgaacggtgcccgcggcggctgtcctgctgctcttttggaaaccggaaatgccgacaggatccggaagccgggcgcctgaataccgggtgtttcctacatgcctggtgtgtaaggcataaaaagctgttcaattgcgggaaattattataaaatgttgtttataatacaaagcttccgttgcggaaacggagggcatttttacaatcgagggaaaatgagcgatgatacaacatggtctggtcagagatgccacagaagaagatctgcaggagatcctggacatttataatgcctgcattggcaacgggattataacggctgacacggttccggtcaccgtagaagaaaggctgccgtggtttaaagcccatcagccggaaagccggccgctttgggtgttggaagcagacggggagattgctgcctggatcagtttaagcgatttttacggaaggcctgcttaccagcctacagccgaggtaagcatttatgtcagcgaaaaatggagaggaaaaggggtcgggaagtacctgctcaggaaaatgttggaagcctgcccgaagcttggggtggaaacactgctcggctttattttcagcgaaaacaaggccagtttaaagttatttgcatccttcgggtttgaaacctgggggcatttgaaagaagtggctgtgcttgacgggcgcatgcacgatttaatgatcaccggcaaaaaaatttaaaggattttgaaaggcttaaggagctataaagttatgaaaatagaattatggtcggatttttcatcggcggattcttatcttgcctttgttaggcttggcgaggcactggaacaatttggccacagggaaagcattcaactggaatttcgcagtttcatgaaaaatcccgaaaaagaagtacatattgaagggagccataaactgctgcactttgcaaaacaacacgggaagcagtcgtttattgccaaggccctgtttgaaacgtatgccaggcagccctcaccaggcaaaggagatttattacaggctgcccaaatggccgggctggataaaggcaaggctgaacaggccattgtaacggatgtttacttggagcatatcaaaaaagaccaggcagaggcagatctgttgggtgcggattttgccccctttatggtcatcaaccggaaatatgcgatttcgggagcccgcccggtcgatttcattgtccggtccatgcatgaagcatggcgggaagaaatctatgtggcggccatataaacatgaaaaaagcgcccggtccggggcgcttttttccgatcttgtgttgcggcggctaaggcttgcactccacattgtgcattccaaaaaggttgccttgccggcttacgcaattcagctcatcgctatatcaatatagcatgattttaaacgaaaaacaagcgtttcagcgaatttccgtttattgccacacccaaaaaaggccggtaattatcccggcctttttagtatcctcaccagcgatgcgcttttgcattgctcctcaagatgatggtgttttgtgtgacttccgtctcgccattgacctgggaatttgtatgtttccgccgcgtccagttgtgatggaacaaccccgaatgcggatccagctggtctttgtagctcatacgatcacctcttggaaggatttggataccgctgatattcataccgaatatcaattctagcttgtgcagaaagggcaaaattacacatcctgcgtgtttccggttggccattttattgtggatggaaacaataagcgggtttgtaaatacaaatacacaaagacacaatgtgctaaagacacataaatcttggtatttttttccgcaatcaccccataatcagaatgcgcctattgtatattgtgctaataacaaaatagtcaagggcgctgccacgcgcaaaccgtaaacatgttgcacttagatagtcaaattacactatgtgctgataacacaacaaataaaaaaacaagccattaaggaaaaagaacgaaccggaagaaattccggcatcccggtattgaagcggggggaggccaagcggcagaaacgggcaaaaaaatcgagcttgattaggctttctaaataatcatccaacaaatgcagacataatatataaaaaacaaccgtccaggaaaagaaacggccggcaaatggcagcatcgccgtttgccaaaccagggcttttcccgcttgaatgcatctgcagaaagcaaagatcttcatgaaagcgctttaaaacaggggagttatgttggaatggttataaaaggatcagcgtcttgccaacactaatggtatggatcaactttttggaggtgaagaatgatgaacatcgagaaagctgttgaggtcattgaccggatgcgcctgccaaacggtgcttataccgccagtttgtcttccgactaccattatgtttggatcagagatgtcgtatataccgttctgccctttttagccacgccgtccccgtactatgaaaaagcataccacgcattgcttgatctgtttatccgttatgagtggaaaattgacattcatacgaagaaaaggcctcggtatttatacgaatatatccacgcccgctattccactgacctcaaggaactcccgcaagaatggggccatgcccaaaatgatgctattggggcttttctttggggagtaggggaaggcatccaccacggccagaaaatcatccgcagccaaaaagatttggagattatccaaaaactggttgactatctcgagtgcctggagtattggcaggccgaagataacggcatgtgggaagagaatatggaggtgcatgcttcaagtgtcggggcatgcgttgccggcttaaaagcagtcaggatgctcgtgcatgtgaaggatgggctgattgaaaaaggagaagaaacactttataaactgctgccgcgggagagcgcaggcaaaccgaccgaccttgccttactgtcgctcatttacccttaccggattgtcagccgcggcatggcgcttcaaatactggaaaatgtcaccactacgcttgaacggaaatatggcgtgatccgctatgtcaacgaccaatactataacgaaggcgcagaagccgaatggtgctttggttttccgtggcttggtttatgtttctatgaactgggtatgtatgataaggcaaatggatatgtggaaaaaaccaagcgcatcattacggaaaattgggaaatcccggaactttatatcggcggcaagtacgtgccaaatggaaataagccgcttgcctggtctgtttctttggcataccagtttttcaaaacaatggacgtccgttaaacaattgaacagtcaattttaagctgttttaaatcagcagcccgcatattcattgcatgtcaaaccaatgcggcacatttaaaacagcttttttctattggtaaacggaatggcggatttgaaaataaaatcattttgtttccattttgacaaaattagacggcctttttttgcaggattcgtaaaattcataacgaatagtaaaagtatgctgaaatagcggaggtgcgacattggataattcagtaaaaaattcgcaacaagtcctgcccactgatttcgagctttatttattccacgaaggcaccctttacgagagctatactttgttcggggcacatgccatggagtatgaaggaaaaaagggcgtgcggtttgcagtttgggcgccgaatgcgcaagccgttgccgtagccggcgattttaacggctgggatggcagcaaacaccaaatgaaacggctcaaagattcaggcatctgggtattatttattccggatctcgcgcctggtgaactgtataaatatgaaattgcagggccttcaggcaatactttttttaaagcggatccatatgcgttctattcggaagtacgcccgaaaacggcatctgtcatttatgatcccggcatgtatcagtggcatgatagaaagtggatgagccataaagcaaaatccgacccataccacgagccgatgctgatttatgaaatgcatttcggttcatggaagaaaaaagccaatggtgatttttacacctaccgtgaaatggcagacgaactggtcccatacgttgccggccatggctatacgcatatcgagcttatgccgatgatggaacatccgtttgaccggtcatggggctaccagattaccggtttctatgcaccgacgagccggtacgggaagccggaagatttcatgtattttatcgacaaatgccatcagaacggccttggggtaattttagactgggttcccgtccatttctgcaaagacgcccacggccttggccggtttgacggaacaccgctgttcgagcctgcagatcctgacatggcggaacggccgatttggggtacatacaattttgactttcagaaacctgaaattttcagttttcttatttccaatgcccttttttggatggacgtttatcatattgacggcttccgggttgatgcagtttcttctcttatttatttgaaccatgacaggggagacgaaaagaaattggcaaaccaatatggcggtgacgtcaatttggaagctgtcgagtttatcaaaaagctgaatgaagccgtttttaaaaagtttccgcatgccttaatgattgcagaagaagcaacatcgtggccgctcgtgacagcgccggtttacgcgggcgggctcggctttaattataaatggaacatgggctgggtgcatgatgtgctcacctatatgcagacaccggaggaaaaaaggcctgatgcccacgatctcctcaccttttccatgcactatgctttttcggaaaactatgtacttcctttttcgcatgatgaactggtttacggaaaaaaatcgctgctcaataaaatgcccggggattttccacaaaaatttgcaaatttacgccttctttatgcttattttatgacccatccgggtaaaaaattagtattcatgggaagcgaattcggacagtttgacgagtggaaagacctgacgcagctggattggatgctgctggattttgaaacgcaccggaccttctttcagtttacaaaagccatgaacacattctatcaaaacacaagaagcttgtggcggcaggaccatgaccctgaaggctttgaatggattgatccgaataatcgcaggcagagcatcataatttttatgagaagaggaaagcggaaaggggattattgcatcgtcctctgcaatttttcaaaaaacaaatatgacaaattcagaattggcgtgccttcattcggaaaatatattgaaattttcaatacggatgatgaacagttcggcggcagcggtttgttgaacaaaaaagcaatccaagtggataaggagccttttcataaccagccatacagtatggaaatcagcattcccccactcagtgcattgatctttaaaaagcaatcaacaaaacggcaaaggggtggtaaaaaataatggcagaaaagaaatggatggcaatgctcttagcaggcggacagggaacaaggctcggggatttgacatcccagctggcaaaaccggcagtgccttttggcggcaagtacagaattattgatttctcgctaagcaactgcatgcactcgggcattgataccgtcggcgtgctgacgcaatatgaaccccatctcttaaattcgtatgtcggaaacgggaaagcgtgggacctggataaaaatttcggcggtacaaccgtactgccgccgtatgtagggaaagacggcggcgaatggtataaggggacggccaatgcggtttaccaaaatatccagtatattgaccactacaatccggaatatgttgtgattctttcaggcgatcatatttataaaatggattaccggaaactgttaaaatcgcatgtggaagcaggggcgcaggcgagcattgccgtcattgaagtcccgtggcaggaagcagggcgcttcggcattatggtaacaaacgcggaaggaagcattgttgaatttgaagaaaaaccgaaatttccaaagagcaatcttgcctccatgggcgtatatctgtttaattggaagcttttgcgcgaatatttaatacaggacgagaaaaacagcgcttcctcgcatgacttcgggaaagacattattccgaaaatgctgaaggataaaaagaaaatgtatgcttacaaattccaaggttattggaaagatgtcggcacggtccaaagcttctgggaagcacatatggacctgctggaagaaaaaccggcatttgatctggatgacccggactggcgcattttcaccggagatgcgaaccatcctccgcaatacattgcgccccaatccaatattaaaaacgcgctcatcaacgaaggcagctggatttatggggatgttttccattccgtcatctcggatcatgtctatattggcaaaaacagcacaatccgggattccgtcatcatgccgagtgtcacgatcggcagcaatgtgacgatcgaacgcgccattattgcgagcggcaccgtcattgaaaacggcaaaaaaatcacgccttcaaagccaaatgatattcagttgtacagctgtccacaaaacggcgaagaagcggaaataaaagaagttttataaaagggacgggtgacacatgacgaacgtattaggagttatcaatttgatcaacgaaaagccgattttaaaggagctaacggaacaccgctgccttgcttccgttccgttcggcgccagataccgcttcattgattttgcgctttccaatctcattcatgctgaaattacccaggttgccgtttttacgaaagacaacggcagatcgatcatagaccatattggttcaggaaaggaatgggatttggaccggtacaacggcgggctgtttattctgccgccggttgccgatgatgcaaaattgaagggggatatccagggcttttatgatcatcgcgaattctttgaacgcgcctcggcagaccttgtcatcatctcgccgggaagcaacgtcagcaaactcgatatttgcgagctggtcgcattccatgagaaaagccaggcagatatcacggttgtatacaggaaatatgacggggagccgatccaaaaaccgaactatcatcaagtggtggtagataaagaggacaacgtgcgggacatcgaattgtttaccactccgcaaaagggcgacttcgtctgcctagaaacctatgtgctgtcaaaactgttgctgatggatctcatccaaacctgttctgaaaacggagaatatgactttttgcgggatgcgatcaaagcgaatgtccataaatttaaaattaaggggtatcaccaccgcggcaatatgatctttatccactccatggacagttaccacgcggcaaacatggccatgctcgacccggatacgatccgcgctttcttttacagcgactgggaaattctgaccaagatcaaacatgagccgccggcaaaatacggacaaacagcggacgtaaaaaattcatttattgcaaacggctgtttaattgaagggacagtggaaaacagtattattttccgcggcgtgaaaatcaaaaaaggggcagtcgtgaaaaacagcatcatcatgcaaaaaacagaagtggaagaagatgcggtattggaaaatgtcatcgcagacaagcaggtggtcgttacccagcataaggtggttgtcgggactccgtcgcatccaaaagtattatgcaaaaaagagatcatttgatggaggggacaagatgaacgtattattcgctgcttcagaatgcgcgccatttattaaaacaggggggctgggcgatgttatccaggcattgcccaaagctttgaaaaaagcggggatccatccggcagtcatcctgccgaaatatgaagatttaaaacccgaagtaaaagcgcgcctctcctttatgggaagcctgaccgtgccggttgggtggcggaagcagtattgcgggattgaaacattggaggaaggggggatccgctattattttttggacaacgagtattattttaaacggcacgggagttacggctatttcgatgatggcgaacggttctcctttttttcgcgtgcagtgcttgaagctcttccttatttgaacgagaaaccggatgtcatccattgccatgactggcaaaccgggccgattcccgtgctgttaaaagcacatttttccagccatcctttctaccagggcatcaaaacgatgtttacgattcataatttgcgctaccagggcgtatttccaaaaagtgttctttctgatcttctcgatttaagcgaattgtatttccatgtggatggccttgagttttacgggaatgtcagctacttaaaggcggggattgcttatgcagatgccattacaaccgtcagcccgacatacgcccgggaaatccagacgccgtattacggggaaaatcttgacggctttttgcggatgaaaagcaaccgtttcgaaggcattgtcaacgggattgatacggatgcttataatcccaaaacagacgacgcgctgttttttacatatgaggactatccgggaaaattaaagaataaaaaagccttgcaggaagctttccatttgcagccggattccggcattcccgttatatcgatggtgacaaggctggtggaacaaaaaggcatcgatctggtgctacatgtaatacatgagatgttaagtttaaatgtccagtttgtccttcttggcacaggcgagcatcagtacgaggaagcattccggcatcttgaaaaccagtatccgggccgggtatccgtacatatttatttcgatgaagccctttcacataaaatttatgcgggcagtgacttatttttaatgccatccaaatttgaaccgtgcggcatcgggcaactgatcgccatgcggtatggcacattgccgcttgtgcgtgaaaccggcgggctgaaagataccgtaaagccatacaatgaattcacaggcgaaggcaacggtttttcgttcgcaaactataacgcgcacgatatgctttacacagttgaaagggccgtttggtttttccgctaccagccgaaaacatggcagtcgttgtctgaacgggtgatggggcttgatttcagctgggagaattctgcaaaagcatatatccggctgtatgaagggatatggccgtaaagaatagggagcacttatacagagtggaaaaaggcgcctgcttcgtaccggcgcctttttactgatgcccacgtttgtttcgccggctgatggcttttaaaatcgataacttgtcttggagcgttaacatattccaacttccgactttgattttcacttttcccaccccccccccccccgcataaggattggcgnnnnnnnnnnnnnnnnnnnnnnnnnnnnnnnnnnnnnnnnnnnnnnnnnnnnnnnnnnnnnnnnnnnnnnnnnnnnnnnnnnnnnnnnnnnnnnnnnnnnctttttactgattcccaagtttgtttcgccggctgatggctttttaaatcgataacttttcttggggcgttaaaatatttccacctccgactttgattttcacttttcccaccccccccccccccgcataaggattggcgaacatcaattatacttgtataataccgcttttttcttcaatacaaacgccaaatatttatacaaaaattgcgtatttcttgccgcattttttctttaacattagaataagaacagaatatccctttaaagctgatggcttttaggtgaatttgtctaaatatggaggcttttgtcatgaagataggttggattggtttagggcatatgggatctccgatggcctgccgccttttagatgcgcatttcgatttgtttgtgtataatcgcacaattaagaaaacggaaaaactgactgaagccggcgccgccgtttgcaaaacgccgaaagaaatcgctgaaaatgcggacgtcgctgcggtttataaagcattaaaacacctgaacttttaaatgcaatggaggagaaaccggggatgaaatttgtttcttggaatgtgaacgggctccgcgcctgtgtaaaaaaagggtttcttgcattttttgcagaaaccggcgccgacattttttgcgtgcaggagacgaaactgcaggaaggccagatcgcccttgatttggacggctattatcaatattggaactatgccgagcggaaagggtattcgggcacggccgtttttacaaaaaaagaaccgctttccgtgcgctacggcgtcggggaaaatcggacagaaccggaaggccggattttgacactcgaatatgaagatttttatttggtcaatgtttatacgccgaattcccagcgcgatcttgcccgcctcggttaccgcctcgaatgggaaaaccggatgcgggcctatttaacggatcttgataaaaagaagccggtcattgtatgcggcgatatgaacgttgcccatcaggaaattgatttaaaaaatgcaaaaagcaacatcggcaattcagggtttacagcggaagagcgcgataaaatgaccgggctgctgaacagcggatttattgattcgttccggtatttttatcctgagcgggaaggcgcatatacatggtggtcttatatgaataaagtaagggaaaggaatatcggctggcggattgactattttctcgtatccaaaagacttgccggccgtttaaaaggtgccggcatgtatccggaaataatgggcagtgaccactgtccggtatttttagaaaccaatttttaattggcaggatccgtttctgccgattgcccttttgtgctgtgcgccgaaacttaaagcccggtactctttcggatttaacaaacatcaagcatccggttttttccgcccgggtgcttgatttatttcaggcacaggcggggttctcttttggtgttttgcagcataagataaaaagcggaacttgtgcgcaatttgcaaatccagggaggcttaaaatggcagtcgtaagggcatcaagtgcagacatcgatttactggcacggcttttaagggcggaagcagaaggggaggggcagcttggcatgctgcttgtcggcaatgtcggcataaaccggatcagggcgaattgttcggattttatcgggatccggaccattccgcaaatggtttatcagccacatgcttttgaagcagtgatacacgggtatttttaccagcgggcacgggaaagcgaacggcggttggccagacgtgtgattaacggcgaaaggcattggcctgccaaatacagtttatggtatttcaggccgccgggggactgcccgcccacatggtataaccagccgttcgttggccggtataaattgcattgtttttacgaaccgacagctgaaacatgcgaaaatatatacaccacttcttaatttgcgagccttttttcatttggcaaaaagcaggatatgacagcgccgatcatgggcaagaaagataaaatggtaaatactgtagcaaccccgaacatatcggaaacgccgcccatgaaaacggaaccgattccgccggcgccgaccccgaaaccaattgacaggccggaagcaagcgcgatatttttgggcaacagcttttgcatatagatgacgccgacagaaaagcttgaaaggacgctgaaaccgaaacagagcagatcgagtacagccagccagccgcttaaatgcggcaacacaagcgcaaaaggcgtggcaaggaacatggacacgacaagcagccgtttcatgccggcccggtctgaaataatgccgccaaaaagcgtgcccagtgccccggcgccgacaaagacaaagttcaacagttcgcttgtttccaaacttgcatgtttcatgtaaaacggaagaaaaataacaaccccgacctggcaccaggaacgcaaaataatgaccagaacaagcaggatgacgccgggaatatggttttttccggcgatttcttttttcctgcgctgaatattttgcactttgctgttcatccagccaagcaggggggctgttaaaataagggataaaagagcaaccggcagcagccagatcaggccgtgtatgccggtatgtaccaaaaagagcgggatcataagcggcccgaaagcctgcccggcatttccgccaacctggaatattgcctgtgccaatccttttttatacccggacgcaaaatgggtgccgcgtgatgcttccggatgaaagacgcccgacccgaatccggaaagcgcaataaaaaccaaaagccatgggagagatgacgcaatggcggttaggctcaggccggcaatcgataagaagacaccgagcgaaaaaagccagacccgcggtttccggtccgtcagcatgccaaaaaccggctgtgttaccgatgaagtaaaataagaaaccagtacaattaaagtggattgcgtataattcaaatggagcgcatgcttgtacatgacaacaagggcaggaaccatgccggttgtcaccaggtcatttaaaaaatgcgcaccgctgaacgtaaacagcgcacggcgaaaaaaagggttttctgcctctaacggcgctgatgtaaatgattgacttcccatacatactcccactttctcgtaatttctttcaaaccgccccgaacagggacaaagacagccggatcaaaaacgagagctgtatgaatattgtaacataattttccacaaaaatgacaaaatgaacctcttgtgtaaagtctatttgcatagcgttttggattgccacttttttcgtgcgggcagagatgaaatgaacaagaatactccggttcaaaagggggaggcgcttttgaatcggaaagggggagaaggggtgtacggaaatttttccaacacttcaagagcagcaagtttgagcatccaagaaagttatttgaaagaagcatagccgtcatcaagcatgacaacgcttccgttaatagcatctgcttcttcaagcgttaacagataaaccgcatttgctatcgtttccgggcggatcagttttttgcgcatttgctgttctgtcattttttgcgtcattccggcatctttataagcttgtataatcggggtatccacacaacccggcgcaatgccgacgacgcgaatgccgtattgtgccagttcgagcgcggcattttgcgtcatcatccggacagcgccttttgcagcctgatatgggaaagtaccgaaatttgccaaataaccgaatacggaagccgtgttgataataacgccttttacatccagctcgcgcatttttctgcctgcagcaatgatcccgtatgccacgccgtgctgattgatatcaatgacacgcaagtaatcttctattttcatactcaggatatgcccgagcgttccgattccggcgttgttgaacatcacgtcaatcgtcccgtatatttcaactgcctgattgacaagtgattcgacttcttcaaatttggaaacatccgtcttggcaaaaacagcatctccgccttcttgtttgatcaattccaccgtttcaagccctttttcttcatcaatatcggcaaccacaacggaatcgcctttacgtgcaaaagttaaacttgtttcccggccaatcccgctgccggcccctgtaatcactgcaactctgcctgacatgatgcatgcctcctgatggatatatttatagaaaaagtaagcgtttacttttctttacaatttttagtgtatcaccgcaagaaaaggtttacaataaaaggaaagaacagttcgaaaaattgacttacctcaatagacagttttaaaaccatcaaaaaagtataaacgtttgcagttactttgaagaaaaagcaggcgtaaaatcaaaccgatgcggaatgctcattaaagcacaaaaacagggaaatcagccagaagaaaaattttaaagcaaaaagagtgtgctggtattgtaagtaaaagaataagccaaaatttagggcgattcaatgaaagaatgtgcgaaaatgtagatgtaaatgcaataacgctgagtgatggaataaacccggaacgatcaatgaccgcgaccgcatacggataaaccgaaatcccgtcctgatgagatgaaaagatgcaataaaggattgtatttcacaaaaaatcgtttatgtctcaatgtttaaagtaatcttcttttttgagataaaatttcattttactcttcaactagttataatatatattatgtaaacttactaatttccccgaaatttgagggtttcttccttcaagtgcccataaaatcaattatccggaacttgttatcctaagttcctctgtaataatcatggctttctccctctctttaaatgatttacttcagtcgtgtgttgcactgccttctaaaaaatgttcacagtcaagcgcagccatacaatcaattcgaatcccatcttgttgtatcccaacttagatagttaattctttaagtttttgatatcctattatatcttccgactgccaaggaataatcacacaatggttttgtgattttcgttgtacttcctcaatccaatgaacttcagactgtacccgtccgcgtagaataggatccactgtatgtgtggcatagaagctttgattgatgacccaccacttcggttggattcctgagcgctttaagtcatcttgtagacggcttgcttcataaaccggtgtagcttcagccaatgtaacaatgactacacttgtttcttccggattgcgaagacgtggtaacaagttttgcacagatcgcggtacttctccagaagagcgcgcaatttctttattatagacttgtgcagcatccaataacagtaaagtatgtcctgtcggagctgtatcaatgacaattatttcttcgctcgctttttctacgatatctgcaaaggcgcggaataccgcgatttcctctgtacaaggagaacgtaggtcctcttctaaataaaccaatccttcttcatctactgtatcttttgcttggttgaggacttcattacgatacttctctacttctacttttggatcagtacggctaatagagatattttcttggactccatgcatcacataatctatatgagcagccggatctgttgtggttaaatgaacacgatgtcctttttcagccaacccaactgcaatcacagaagcaattgttgtttttcctacgccgcctttacccattgtgaaaattacgcgcttccttgactctgataagtcatcaatcaacgtttttaaagctggaacgtgcaatgactttgtttcatctgccggtacaacccttgtctgttcaaaggtgaataacttacggatgttttctactccggcgatattaaatggcactaacggaatttcaaatgtttgcaatccttttaactcatttggcatctgttccaatgcatgaacttgtcgagtaaagaaagcagaagaaacctcatcatttttaacgaaatccttcatcacaccattaataagaagatactgatttttcaacccaatctctcgtaactctttggatgctcgtgccgcttcttgaagcggagagccgtcaggacgagtcacaagaagcaaggttgttttctctggattcgctagtacctctacactttgttcatacattctcttcttagcgcttagtcccgctaacggacctaaacaagaggcgccatgtgtactttcttctagaaatccactccatgcagcgggcaactgcaacaatcgcaacgtatgtcctgttggagccgtatcaaaaataatatgatcaaattgtacagtaagttccttgttcgtcaataatgtagaaaactcattgaaggctgcaatttcaacggtacatgcacctgatagttgctcctccatggaggcgataacggtttctggcaactttcctctatatggtccaattactttttctttatattcatttgccgctgtttccgtatcaagattggcagcaaataaatttgggacattcggaatagcggtaggtttattttgcagctctacttcaaacacatcttgtaaattagacgcgggatctgtgcttacaagcaatacttgttttcccctatctgctaacgcaatagccgttgcacacgccgttgatgttttccctactccaccttttcccgtaaagaataaaaagggagtgaaatccatggatcgagggttaaacaaagtggtcatgtcgattcacttcttccgttattttttcacattgaggcttaagtgaacttttggtttttggcttaattcttcttctgtcatacccgttaattctgataactcagcaatagttggatatcctttttcttttataacttcaccatccactaaaacgaccggtaatacatctggtcctttttctgtcagtagtttactgatgatttcgtttgctacaaaagcatctggttcgcttccaaggttataacgtacaatatcaattcctttattcttcaaattgttaactgctatggaaatacggattaattccgggtctatacttggaccacaaatccctgttggacagcacattgctggatcaaagatttcaatttttctcatgatttcccctcctgtaaaaccagccgagaagaatcttctcggctgtcattcagtcttattcgcctgtttccgcaaattttttgatgcgtgcgccaatttcatcgcgtacacgttggaatacagcccatttctcttcgtctgtgccttctgcttttgctggatcttcaaacccccaatgaacccgttttacttgaggcggtgtcatcggacatctctcatctgcatcgccacaaagagtgacaaccagatcggcatgatttaagtattccggatcaatcagtttggacttttgattggaaatatcaatacccacttctttcattgcttttactgcattgggatttaagccatgtgcttcaattccggcactttgaacctcccactcatcaccaagatatttttttgcccatccttctgccatttggctgcggcaagagttacctgtgcataagaagtaaattttctttttgtttttcatgtttcattccacctttgttgttagtaatatactgattctgctttgaaatattttcgttgaaaccataatgccacgttaaccaaagcaatcatgacaggtacttccacaagtggtccaatcacggctgcaaatgctgcaccagaatgaatcccaaacacgccaacagctacggcaatcgctaactcaaagttattactgccggctgtaaaggcaagtgtagtggttacaggatagctcgctccaattttcttccctaagaagaaggaaacgaagaacatcaacacaaagtaaatgaacaatggaattgcaactctcactacatccaacggcaagcttacgataacgtctccttttaaagagaacatgacaataatcgtaaacaataaagaaatcaatgtaatcgggctgatttttggaatgaatactttttcataccattgtctaccctttgcttttatcaacacaaagcgcgtcaacattccaccaataaatggggtccctaagtaaatgaacaccgacttagcgacttcaatcattgtaatattaacgatagcaccttttaatcgtaaccattctggaataattgtcacaaacacatacgcataaacagagaaaaataacatttggaatacagagttaaacgccacaagtccagctgcgtactctgtatctcctttcgccaaatcattccagacaattaccatagcaatacaacgtgcaagaccaatcatgatgagtccgaccatgtattccggtttatccggcaagaatacgatcgccaacacaaacataagaatcggtccaataatccagttttgtacgagcgataacactaatactctcacatctttaaagacgcgcccaatctcctcataacgaacttttgctaacggaggatacatcattaaaattaagccaattgcaattggaatcgatgtggttcctacctgcaaactgttcattccgtctacaaagcccggaaagacgaatcctaagccaattcctgatgccatagcaaggaaaatccaaatcgttaggtatcgatccaagaacgatagacgttttttccccgtattattcattttttccctcccaatttcattattaggttaacaaccacaacggagcgtagggttgttttcctcaatcttacgaatattttctgtttgatctggaacgtgttgcagaatatcttggatgaaatcatataactcatttcgtggattgagggaataataaatccactgtcctcttctatcctctttgactaatcctaaatcttttaatttacgaagatgctgactaatagacggctgactcatgtcaaacacttcaagaagctcacatacacaacactcacgttgttttaaaattgccatgatcgttaaacgtgttttatcaccaagcaactttaaaacgtgtgatgctttttcaatttccactactgttttttgcatgggaacacctcctcttcttgtatgattatataaatatttacttatatatgaaccaaaaagaaagatgatacttctaaatcactttatttgtaattttgctcatctcaaactaaataaataatgttacatcttcatatccacgacatggatattgtagtataaccatttacttactcttacctttaataagtatataactacatacttatataaaacaagaagaaaaaacgactttaacataatctttacaattcaaacgaaagtatgaaagtaggtaaacaagccgggtcctttttccgttaataaacgctgcacggcttgattatcgaaaatacatccggctcattggcaagattattattgtttaatcggataccttgttttctcgatgacatagatagcagacgaggttcttgataattcaggatcgacactcggatgtagccgtcaagtaaaattgaacactttttgctaattaattttgaacactttttttcataaaaatggatgatcgatgtttcatgcgatagctgtcatcgttcctaaaatggatgacttctgctcggtgtaataatctgtccaaaatagctgtcgtaatacctggatcccccaatagttcaccccattcatttgggcccttattagaagttagaatgacagaagcattgtcatacaagtcgttaattaaatggaaaaacaaatttgcctcccgtgaatccatggccatgaacatcaagtcatcaatgatgaccaggtttgaatcccggatgcgcttcattcttgtttgcgattttcgggtaacatcttccgtcttcaatgtttggataagctgccccatggagataaaagaaactttgtagccctgatgaattgcctctatccctaatcccgttgccaaatgtgtttttcctactccaggcggtcccagaataattaaattaaaaagctgatcaagccatgtgaattcttttaactgattgatctgtctcctacttagcgattgttgctcgtctacttggaatgcatctattgtcttgtaaaacggaaacgttgcccattttaatcgtttttcaatcaatttctcatctcggcgttccaactcatagctagtcagatgttccagaaaagtgcggtatgtccaatcttgtgattcagcttcttgaatcagagatggcaaatgatttgccgtctctgataatcgcaatgttcgaagctgctgctgaagtgttttttgcaagaaaaaagtgcagagtattgcagtatataaattcgtttataccgcataaaaattcaatctgaattctcgctattaagggcttgacatggagcctctgcagccatgattcttttgccaagcggccagctgtaacagatttggcaaacccaaacaggttatcatggctacccctccatgtaaagcccctctgcataaccatttgcatagaaattttgcacatctctgcactttaattttgcaataaacagctgaagttgttcaagtgactgtgtcatactttgttgctcctttcaacacatccaaatattgtgctaattcccggttctccggctgtgtatccagaagtgaaggttctatgccatgcaatgccttaatctcctcttctgcacgtttaaattcctctttttgttgctgctgtcgctgaatgaatgccagtacgtcactatattcactcgcactgtatatcccacgtttgatgcattcgcacaatgcttcatccctagttctttgatcagaatctttagacatctttaaaacgattcccagctgatcccgaacataacgtggatatctgtgatgaatttcttccagaaaagctttagccctttcttcatctgtaaaatacgaagatacagtggaaatatacgcagctatccctttagtacgatctcgtgtgtgctgcctatcttgtataagttttcctctctcgaatgaaatgatatggttggcaataactggcccatctgtttgttcacgtattaccagacgattctcagctgttatttcaatatagacatctttatctttttgataggttccgagaggaaccgaatagcgattggattgatagacgatcgtattgtccttacgcactgttcttgttatactagagttaatacttgtagtagtaatttctttgataaccggtttgaggtgttgcttttccaatgtaaacacttcaactggcctttttttgttgtattatgcacttttcggttcccagtcctctccagccaggatatgcagctttcattccattgatcaatattttgaaagatgcggtgtttggcgaaattgcccttcacataaccaacgacattctcaattcgccctttgctttccgggtcagcttttctgcagaaatagaccttcaattttctcgcttcccgataagactgaaattcctttgtcagaattaaatctcccgcattctcgtttaccatgagcagggcatcctgatcatataccagttcatcggtcatccctccaaagtattggaaagcgtgctcatgcatacgaatcatatcttttgtcgtaaaaggcctgtccagccattcaacatacttatatctagaatgcgataacacaaagcttataaaatacaattttacacatttaccttgaggcgttttctgattggttttcccgaagtctacctgagcttgttgccccattggcgggtcaggtatcgcttgataaacccgttgatgtgtctcttttggtatggcatatttttcacgaagttctttgacataactacgtaccgtactttccccaacaattagtttagggtagtgctccatcaaccaatcatggatctgtgccgaagacacatctgggttttcactcagccaagtatgaataatcatttcataagcacttgcttcttggtaccgtttaggccaatcggcaagtaggggccatatttaatatcagattgccaaagttgattccgatacctcttttgaaatcttctcgctgccactcctgactgggaataaagccgcatttgccgagaactgtatcctctttccgatagcttgtcttgaagggttgagcgcttgatttgccctggttctgcaagaccttcccattcaaggatctgtatgatttgcgacacacttcggctggggatctcccttctaagcagaatagcttgttcgataatatgtgacgggattgtcccaatcttcatttgagactgctttccttttggcttcaatcctgaaaatccttcttttcgaaattgcgttaaataacgtctgatcgtcctttcggaaagaccggaggccttacaaatttgttcctttagttcctttgcttttccggcatccaacccctccgccaataaaggagaaataagttggaacctttgggctgcaatttcatctgcttttttatgatccattcatgatagactcctttcctctttatctatcatgagtgtaaattaacccccaccggacaagaatgcagaacgggtatgtatccataaataaaaatttacaaggggccggacaacacgtgccagccatccggattcattgcccaccaatccctctaatctttggagtgcggtccctgcagtttcgggcaaaacttcaaggtcttccccatcttgttgggtctgacgtttaatggaaacaagacaatggatccagtattctacataaaaataaaaccagtctagccaacgataaagggttgattcatctgccggaacatcatggttggatggattagttaaaaccatttcaatacattttgctttatatcttttataaggcaccagaaactctgggagttcgtgatgaatctttccgcattgttcacatcgcaaccgccggatattataaatatgcttctttccggatctatcaatggcttttcgatctcttgtcccaataaccttcatatgtttaccacaacaaggggaaggaacttttttcgcacccctaaccaaaaattccaaggtatgtgtaaaattttaccatctgtgatcataagctgtttaacgagctgatctcttaatttggcgccttctctcagttcggcataaatgccgtcctccctggatatcaattaagggtccatttttgcttttcaagctctggacacctcgtatcataccaggggggctcttttttgtgcaaacctcaaatttccttcattacaggaatgctcctcttatgttaacaaatgccgaatagtgatgagaggttcactatccggcattcatctaattaaaacattctacctcgatacaatcctcaacataaacccattcacatcattctccggctcttcaaaaacaatatctgcatggatggcttcaaaaaaatggttgaaaacgaaacggctgcatccgattgttttggcaataggatttcctgtttttttgttgggcagatgcggaatttgtaggctttgttgatcagcacggtttccacctctttcgggaggtagaagcggccaacagttccttcggcttgaagaatgacggccattccccctcccttctcttggccgtccttctctgaaaaacggttcccccaaccaatcagaacgaatgaaatcacagtgcaattcatatgtttagaaaaacgggttaaggggggtttcagatgaaaaccgtacattactatgaaaatcagcaacatatactgagccagctggtgaacagggttccagtttgcggccaggatatcagaatcaaaggcagaaatggaaaaataaaagatatattggaaatcacagaaaacgtttatcgtgtgcaagttcagttcgaaccggctgccaaaaagcggaccgttacagttgacaacaaaaagaaaaggcgctgatgcaaaaaactttcctgcagaaggaaggttcttttttatcctaacactttttcaaattttcttagcttctcgtccgggccgaaaacaatgacaatatcatttgccaataatggctcaaaaggttcaggattgttgataattttctcgccccgttttaacgccagaaccgtcaccccgtacatttcacggatccgggaatgtttcagggaccggccggataacggtgattgcccgccgacaatgatttcttcaacactgtaaaaggcgtcctcattttgcagtacattttcaaccagttcaacgctgaccggacggagcactgacatcgcaatacgatggccgccaatgcttgccgtattaatcactttatcggcgcccgcactgtatagttttctctctgactcgtgtttttccgcgcgcgtaacgatccatatatccgggttcattccttttgccgtcagcgtaataaatacattgtccgaatcttttgggagcgccagcacaaggcagtcagcccgtttgatgccggcagcaatcaggacatcgtcatctgttgcatccccggtaatatataataaatttgaagtgttttccagttcctgactgtttttttcaatgacgacgaggagcttcccttctttttccagctggctgatcacttgttttccgaccctgccgtatccgcatacaatgatatgttgatggagcctgttgatttttgcattcatctttctccttttcacctcgctcgtaaatttcccttcaattaaagcggcagcaaattgtgccagtatgtatgtaaccagcccgatcgcgattgggataagaataagcgtgaaaatttttcctgtaaacgtaaccggatacatatccccgtacccaattgttaagatggacacaactgtcagccaaagcgcattaaaaaaagacaggtgctccgtccactcgtaaccggcagtgccgatgatgatcatcaaaataaacatcaaaccggcaatgagaattttacggatattcatccttgttcctcccgtttggacttccctattattgcacacgatgtatccataagcacgcagtaaaatcattttttgctgaaggatggggatgccctcatttttgttcttttcagcattgtggagacaatgaaaaagccgcctcgtccattgttggccgggcagcttttttgctatttttaaagatcgttgaaatcactttattgtaacgcattatgctgtccgcgacgtaagtgcccgggcggagacgatgctcaacacccttcttttcttcatgcccttttacacctttcaggtcaagcccgaatatacgattttccggtttttaccgatgccattgtatgctgaatcgattttgccgattcgtgcagccaggatgtttcctgttcgtcgagttcaatttcaagttgttgttcgatcccgccccggccgatgacacttggtatgcttaaagcgacatcaccgttatatccgtactgaccgtgcaaagtggcggaaaccggataaatgcttttttcatccagcattactgcttttgccaatgtgactgcagcctcagcgacaccggcattggtccatcctttcccattcaggacatcaaaagcggttttcaccaccttttgtctgaacgtttctctgtccaacggttctttttcgcggaatccctgtacatttaaacggctgaaaaccggaaatgcggtaaacccatgctcgcccatcatataccccgttacacttttcggatcaatgccgtaattttcggcaacaatctggcggaggcgggccgagtcaagcatggtgcctgttccgaatatccgccctttcggatagccaaattcattttcagcaatatagacaatcgtatcaagcggatttgtaataaaaatgatgacagcttcttttgtatatttcgtaatccctgccatgacttcccgcaccacggcggcattcgtcctggcaagccctgaccggtccggcatttcgtctttttccgatggaattacgcttggccctgctgcacaaataatgacgtccgcatcggcgcattccgagtaatcccctgctttcacgcttgtgtttggcatatatgtaagtgctgtggcatgcctccaatcgagcgcttccccgaatgcgaccccttcctttttatccagtacagcaatttccgaaaaaaggcccagtttcatcgcatttgcaagcacataagaaccgacatgcccgacgcctgcaaccaccaatttcgtctttctcactgttgtctcccctccttgttttctttattttaacatttaaagtcatactattgcagagaaaatttcgcaaaccggaaatactgcataaaaaaagctgcccgatccgcagtacggtaggcagcttaagatgcatgattattttttaaaaatggttgaaatcactttatcgtaactcatcgtgctgtccacgacataagtgcccggtcggagatggttctcaatgcccttcttttcgacgtctttactgaatttaaatgcatcatccacgatatttgctttctcaagcaatctgccgacatcaatgctggtcatcccatccgttacctggaatacaacccggttgacggttttggtatttgcagatttttcggcggatgacttcgcatcggccagatctttgtcatatgcagccttggtttgaacgacatatcctgcttgctccagtttgtccttcatctggctgttggagagctttgcagtttcagccgtattggtttttttcaccgtattgtccgctgctttgcctgttccggaaaaataaacggcgcctgttacagccgtggcgagcaaaatccctgcggcaaagctgctcaatttattcattcccaccggcaaccttgctcctttcgtttttcgccgccataaacggggccaagatttcctcaatttcggcttgcgtcacttgttttttttctgcaatgctttcaatagagtagttgcgtttatataaatccagcacttcaagcctgaactgtttatcaaaggcagaaagctggatgccggcttctttttcaagaatttccatttccagttcaagcgtctggatgccgtctttcagatgattgatttcatccataagtgccaaatgcaccgtttccaattcctgctgttcctctttcgcacggttccgcgttttaaagatggaaatgatcagcaacacaacggataccgcaaataaaattgctaatgtccagaccatcaaatatgtatccctccttcaaaaactcttcttcctgttctctattattatacatgtccggccctttattttcgataaaaagcaagaatttatgacaaaagttgcattgaaaaacaccaaccgggccggcggctggtgcagtgttgtttaataatacggcgccatcatcaagtaaacgataacgccggtgaggctgacataaagccagattggcatcgcccagcggacaatttttttatgctttttcacctgcatcgtccatccccacacaagcgcgaacaaggcaagcggaacaatgatggccgcgagaaaactgtgggtaatgaggataaagaaatagatggcccggattgccccttccccgccgtatcttgccgtttcaggcgaaagataatggaacgccaagtaagaaagcaaaaacaaaaacgttgacgcgaaagcagccagaacaaatcctctgtgcacattgatatttttccgtttaatggcaatgagcgcgcagaccagaaaaataaacgtaaagctgttaaaaacggcgttcagcctcggcaaaatataaatatcaaatcctacttttcccttgtaaccgatgttcgtaaaaaagagcagtaaaatgatgatatttgctataagggaaacggtgataatcagcgccgtaaaattcttatcacttttcggttggtaagatggactgttccctttattcatgttttcaagcaccccgtcatttttatattctgtaaccatatgcttccatgatagcatgaagattggcagacaaacaacaatagcgaagttttgtatgtgtcaagtttttctcgacaaggtttaaatatcgggtattccaagacactctttttgtacactttcggctaccgtgcttcacttgctcggtgtaattttcggaaattccaaggttttgtcttccgttctggatgggcgtcctaaccttggcccactcagacgaatgccaagagatttgcagtatgccagattattacggtttcggtaaattttatctgccaagatcgcttccggataaaatccgaaccggttgtagtagttttcaacagattccttgagagtggtcccttcattgtaattttcccagtcgaggtgctcaatcaaggcataaccatctacgacactgatggcgacttttgaaccgaactccacgttcgcttttgccttgccgcgcacaattggacggacatgtggctgggaaatgcttacaatccggtggtcaacccggtgtgttttctttttgtacatttctgcctgttggcggtaaagttcatgaatcacgagaagttgcctgtattcatctttgcttaaaagagacagagagctttgggaaacaagatttttaatgatctccagatctcgtttcacatatccgagctgtttgcctacagctttccggattttccgggcgccagctttacgttgcttagcgacagaaagatagtccttgcgggctctttttctgtaggtccgtggcttacgtaatttccctttgtgtggttcatgcaggacatcaatgatatgttccaatttctcacgggcttcgttcaacaacccgaggtctgtagggtaagcaatatcagcatcggaaacggattcatagctgcttgggctatatgacgccacaagagacagaagacagtatcaaaggggcagcgtagtgctcttcacaattttacaagcatccgctttacatggagtggcgggtgtggcaggcttgtttgccatgcgaaagaaatcattgcccctttcgcccttcgcataacaccacgcccgcagaggctccatgtcaagcgaccagcgatgtcatgaaaaatatggcatgagatcaaaattaaatttcacttattggtgtccaaaatattgacttaaatccattttttataatgaaaagacagggactattgacttatggtagaatttgtttaaggaaaaaggggggattatttcaatatgaacgtttatgttagtgaagcaagtataaaggattcggtgggatatttttctaaactatctataacatctcctgagcagtttggcttattctttttatgtaaaggtgttggtataagtcataatacatacaagcctttgaagaaagctggtcaaatgacagaagatgaaaagaagctatactatgacagattacataaacttggggcggtttttgattttaatgaagaaggaataaaaaaatgctgtttatttcctttctctattaaagaggacattgcaaagggaaatttctataatcaggcatcatcatttcaaggtttgttgagtaggcttattgatacgattgacaacactcttatagataaatttttagaaaagcaagaggatagtattagattgaaaagaaactacatacagcttcttaaagaactttatttaaatggaaataaggtatccttgtcacatttttcagcatattattgtagatttatttctttttctgctgacgaatctattgaaaaggaagatttcacaaggctttgtgttcaatatacaattgattcattgaatctgcttgagagagagttagatgaacttttttacgatgatacagcattgaccccaattacctttcaagaagatatggtcactggtcaggaattaagaagtatgttttcttttaaaggaaaagaggattttcccgaaattagctcttcaagagattataacgtggtaagtccgtatatgttggttcttgaagatgtaaggaggtatatagaattgaacggtaaaaacccttccgccaatgagattaaagaattgttagagttgagaaaacaaatcgttttatacggtgttcctgggattggaaaatctatgtttatcaaagatttagaggactggagagacgatgaaggaaacaagttctttaacgaagtaataaaaatccaatttcatccttctacaacttatgaagagttcataggtggctcttctattgagaatggaacaattgtttcaaaagctggaatttttctgcaatggtgtcaagaagcaataaaatatgataaaaagaagtatctttttgtaattgatgaaataaatagaggtaatatatcaaaaatatttggggaaacgattttaggtttagatagagaatatacagttgatttagtaaaaccattagatgtaaatggtgaacaaattagtaaattccaaatcccagataatctttatataattgctacaatgaattcagctgatagaagtattgccatcttagataatgccatacgtagaagatttgcctttattaagctctttcctaattacgatatagtaaaggaaatgtcagatgtacagacgttaggtattgatatagccagactttatagaagtataaataaaaaaatacttgatacgctcaatgacgaagaattgttattgggtcaatcatacttccttccaaattttgccgaaaaggttgaaacaactggtaaaattttgtggtctaaaaagttgctaagacttgtaatcaattacaacgtacttcctattcttgaagaatatacttatggaaataagaatgatttgcagaatataattggtgacaaactccctgaacggatttatgaagacgaagagtttatagacgcaataaaagaacaatttcctgaagtagttctgtaaaggcgatgcattatggagaatagttttaaaataagtcaaggacattccataagtatttatgaagatgaattaaatgtcgtagaggcaatgctcaaagcaaaaggaataaatccagataatctggataaagaacaaaaaatcttaaatcttagccagaaatacgttggatatattagaacaccaaggcgaatgattgaattaatgcctaaacataacaaattgggaatgaaacatatctttagaatgtattactttgtaaatgggcattttaataatcttcatgataaagtttttgatttaactcgttcaagccagtatgtaaatgtaatcgacttatttttaaatgagttagataagattttaaggcatggtcttcctactgaatatattgatgtggtagaggaatcaaaatatataagaggctctgttgattacgtatccagttataaaaatataatgcttttaagagaagagccttttttaagtcaatatgatgaagtttcattgcagactcctctaaatatgactttaaaatttgctttgaataaggtaaagaaggtagataaatacagaggtataatacaaaagtatgaaagagccttacaatcaatttcaaacgattataacaaaatacgagatacaaaggtggtattcagcaacaaaaataatctctgcaaggatgcttatttctatgcaatgcttattataaatgaatattattttgaaaatctcggcaacaaaaatggtgaatgctttttaatcgactttgatttattgtatgagcaatttgtaaagaaaattttatttgtctatactaacgataccatgtttcaagattggcaaaaagataaaatatatggttcgtatggagaaggtcaagaaaagagttttagaccagacattttgtatggatataatgaaaaggaagaaaaggcattagcaattttagataccaaaaataaattttcttctgtattcggaaacgctgacgtgtatcaaatgttattttactcccatatgttaagtgcaaaaaagattgttttatgttatccaagtgtcgagaataagcataaagacgttctgcgtattgaatcggataattttattacagataaaatttatggagtttatattaatattgctgttgaggagaaagaggcatttgttgaagcaataaaccgatttatagacgatgtatattcttgtttgtagttcccccttacagtagccattttggttgtaaggtattataataattgttaataaaatagttcatttaaggctttgactattggtgtcgttatataaaaaacgactttcaaccactatagtcaaagcctttttccgttttgggaaatggtaacttgattacagaacttgataattgagaggaggtgataataatgaatacctgggatattttgatgcatggcaatttatatgaacaggaatttgaagccgatacggaagaagaatttaaatttatcaaagaattgcagggcgaatatgaatatgaacggtaatatttttgatacactctgtttgtttttttggtctaaggaataactttttgttcaaaagcggtgattgaaatgtgtgaaaaaataattagacctaaaagtgatgaaagcctttggcaatgggaaggaacgagagtatcgcattttgcatgtcatcaagacagtgttgaagagctaatccgttcgtatgaaaaagcctatagtgagcaagggtttgaagttgtagacacgtatgttgtacgagggattatgaattgtgcagtgaaactattgattaaacccctgctaaaatataacgagcaatgtgggagtgaataatatggtgataaaggaagaagggcaaaggattacttactctatgcaggaagccctccctgaaaaaatagatgttactgacgacccaaaatggcaggaaattgacggtgttatttgtccaaaaattgacggaattgttgtcaattaaggggggaagccagtttgcgctttattgtggcttcccctatgagtttaatacttaaatttaaatcattgtcatttcacgaaagttccccttcaatcacacgttttaccatatgatcgtcaatgattcgatgcctgttttgtgctccgtaaagtagacagtgggtacaaatcttgttgataatccttgcggctcccccggaaaaacgatggatttcatccaaagctacatctgtgaagatttgctcatttactcctgaatattgtaaatgcatggcaatatattctgcagattgagctctgtcgtaatgccccagtttgaattgaatatcaatcctttggcggattgctgtgaaggattggaggtgcaggcggtcccatcattcactttgtccgacaagaatcaggctcatagggctttgggcatccattttgaagttcagcaggaatctgacttcctccaacatttcccgatcaagaagatgggcctcgtccacgaccactaccggctgaacaccatgaattcctctcataagctcaatttcccgatgaagctgccgttttgcatcgcctctataaaatttagactcgcacccgagttgttccaacaaccctttgtaaaaatgccgaggcgttaatttggaatcagacaagtacagtactttatattgtccatcatcaagccggtcaacaaatttacgaatagtcgtcgttttcccagtcccacaatcgcctgttaaaaccgcaaataactgccttccagccgtatattttaaccgccccagtatttcctgcatcataggagaatcataacccacatttcgcacgtcttannnnnnnnnnnnnnnnnnnnnnnnnnnnnnnnnnnnnnnnnnnnnnnnnnnnnnnnnnnnnnnnnnnnnnnnnnnnnnnnnnnnnnnnnnnnnnnnnnnntcggaatttggcttgtatctgaccaaatttgattcgttcagcaagccctaattgcatttctctgcacttttctattgcaaaatacagcttcgggagcaccatatttttgcactgcttgtcgaaaagcatcctccacaatccgggaatcaagtgtcggataaaattcaccgtgtaaaacatacctcgtcgcatcatcaataatggcgaccaagtatacctgcttcttgccaccatttgggccaatcggtaaatacgggccatatttgatatcagactgccaaagctgattccgatgtcttttttgaaaccttctggctgccactcctgattgcgaataaagcctcatctgcctggaactgtatcctctctctgatagcttttcctgaagggttgaacgtttgatttgcccgggttctgcaagaccttcccattcaagtatctgtatgatttgtgaaacacttcggctgggggtctctcttctaagtagaatggcctgttctatgatatgtggcgggactgcctcaggcttggtttgggactgctttcctttgggcttcaatcctgaaaatccttcttttcgaaactgcgttaaataacgcctgatagtcctttcagaaaggccggaggccttacaaatttgttcctttaattccttcgcttttccggcatccaatccatccgccaataatggagaaatgagttgaaacctttgggctgccatttcatctgctttcttgtgatccattcatgatagactcctttcctatttatctaccatgagtgtaaatcaacccccgccggacaagaatgcagaacgggtatgtacccataaataaaaatttacaacgggtcggacaacacgcgccagccatccggaggcattgcccaccaatcgccctaatctttggagtgcggtccccgaagtttcgggcaaaactttcaggtcgtccccatcttgtttggtctgatgtttaatggaaacaaggcaatggatccagtattctacataaacctgaatccgtgacgaaaatataacaaacgccgttaataggtagatttcccagagcccttgccaaaatgctttacgtgcggaatatgcgtcataaagcttttcagtcggaatatcccgtgaaaaaggcgtatgagtcataccgtagaaggcttcaaacattctcaccgtcctccttctatacagcccggaaggagacggctggtgtttgttccatctgtcgttcctgatacttttgttccgcagcttttaataatcttgatgaatcggctttctgtggctgaagatgatcaggaaggggtggccttttccctgatctttcaccaatttcaagtttatgagctttccatggcgaatagccttcaaactcaatggtgagttcctccagatccgcaggatcatagataacttcgactttctgcccaataaatgccaggcctacttcgtatttttgatccatgaaactgatacagccggatttatccaccttgcgtgtttcgcaatgcaggaatgcatccgccaatgtatctggctcaatgaaacgaagtgcttttctgtcacttctaaatgccgatcttgggcttattttttccccaagcgcagaatgcggcttctcctgataacactctgtcagccagacttgaaacagttcatttaaccgttctaatgtcttcggcttttctagtgagacttcccccagaaaagaatcaatgagccggttgaatttttcaaccttacctttgctttctggcgaaaatggcttcgcgtaaaccagccgggttccaagttttgaacaggttctccccatccatttcgtcctgtattgtttgccattatcaaagtaaacggcttcgggtgtgtatggcaaaataaattcattcaaggtgtacatttagatgatagagtgtcttcccattttttccactcatttgccccttcgagtaaaattttacacatacgaagttttttcacattcatttttatttgtggtagagtaaaagtgaaaaatcatacatactggagcgaaatgatgggacactatgaagcactttttttagatgtggacggaacgattttgacaccggaagatacgatccagcctccaacaaagcaggctgtggccaaggcaaaaaggtacggaatggaagtctttctggcaactgggaggccgcttcatgaaatttcgtggctgatggacgaactggatattcaatccgcaatcggctataatggcacgcttgctgtttataaaggaaaaaacctttttaaaacggtaatggacccaaaaattgtggacaaatttattgccattgctgaaaagcacggccatgaagtcgttttgtatacggaccggcaaaactttatcacttcttttgatgtgcctgaagtggaaagttttataaaaaaaatccaccttcgccaaaacgccccttttacaccggaagcacatgatcaaatattgggcattacgcttgtaaatgtccggggaaacggcgcggcattgtatgcggatttgcccggcctgcatttatcccaggtcaacattgacggattcaggcattgttacgacgtcattcttgaaaaagtgaataaaggaatggctgtagccaaaactcttgatatccttggcattccaaaagaaaaagccgttgcgttcggggacggcatgaacgataaagaaatgctgcaggtggtcggcgaaagttttgcgatggcaaacagcaaccccggactgtttgcttatgcaaaacaccggacgacaagcgttaccgaatccggcatttaccatggtttggaaatgctcggggtgatcgatcaagtataaggggcgtccgttttaacagtgaattaaaaaagccggaacacccggctttttttatgaaaaattatcccggagcgctttttgcaaaagctgctcgcaccgttccaaatcagccttgacaagttttttgtacgcttttgctttttccatgtctttaattttgtatacaacaacctcttttctttttgctccgtccggttttacttttattttggttaaaatttgctcctcatcttccagttcatgaagcgcccggtagatttcggaatgctgcggttcgaaaccgagcggcttaaattcttttttcagttcatccaaaagctgcagcccgtaccagcgcccgttttcaatattggtgatcatataaagtttcaaaaaggcgcgctgtttgattaaaaagccggtactctccctttgccgcttttccgccatgctgctcacccctttttcttccattatagtaaaatgtgccggcagcacacaaaaaataacgctcgaacgtatgttattttaattgcaggttttttgttttattgtgtttttagcacactgtgtattttgatttgtcccaaaacactttcattttctataaaatggaaatgcgttttatatccatccgcgtatccggctatttttttacagctggcaatagaatggtgaacatttaaacaattggttgaaatgaaaaatttatttatcttttagcacatagtgttattgaaacaaattacgcaaaaaaataccggcgaattgccagcattccgcttttcccaaacggcatgggcgccttttctcaaaatgaggattttttgctgccgtactgtttgccttataccccggagatttgttttcgcaaaacgtgttttaaaacttttccgctcgcatttcgtggaagtgcttgtaaaaattccatttcggccggccatttatattttgcaagtttccccgaacaatgggcgagcactttttcttctgtcagtgtttcgcctttttttacgacaatataggcttttggcacttccccgtatatttcatgcggaatgccgaccactgccgcttccaaaatttccggcatttcatatagcacttcctccacttccaccggataaacattttctcccccgcggattaacatatcttttttacggtcaactaaatagagaaaaccggcttcatcgaaacggcccaaatccccgctataaagccagccgttttgcaataccctccgcgtttcttcttcatttttcaaatatcctttcatgacttgcggccctttaacaatgatttcgcctacttccccggcgggaacaggtgaaccgcccgcatctaccacttgaatttccgtttgcggcaatgctttgccaaccgaaccggccttttccaaagcaaaacggtcagttaatgttgaagcggccggtgcattttcggtctgcccgtataaattttgcacttttactttcggaaaacgcgtttttaactggcgcacacgttcatacggcatcggagacgcgccataacagaacaatcgcaaataagaaaggtcaacttgagccattttcggcgtattgagaaggatactgtacattgccggcaccccgaagaaaacagtaactttttctttttccattgtttcaagcgttttctcaggggaaaattgttcttctatgatcatggtgccgccacggtagatggatggaatgctaaagacatggcatgccgcgcaatggaataacggagttacaatatgcacgcggtcttccctgcttaaatccattgcctcagaccagatttgcgccgctgcccggacatttgcggcagacagcatgacgccttttggcctgccggttgtgccggatgtataaaaaacgacagcagtatcatctgcctctatttggggagtcataaaagcatcagtattttctccggcaacagcccggaatgtgtcttccccgccaaccaccaggcggtcttggaactgatggaactcgcgcggaatttcatgcagtatatgaagcaagtgggaatcatagatgagggcttttgcttctgagtgctgaaaaatatactgcacttcgggcggcgccaattttgtattgacaggcatggctgtaaaaccacccagttggcaggcataataggcaatgagcagcgcatcggaattatggagaaaaagggcaatcatgtcccctttgttgtatccctttttttggaaaaaagcggcgacatttaccgactgccggtaaaattgggcataagtcgttttctttccccggtaagacgtgatgatatggtccggttgatgaatggcatgccatttaagctgttgccctacaaacatttttactcctcctgttcgaaaaacccggtttttccgtttgccgcagtaaagcgccggctgcggcggtcctttcctgcctgcagccggagacaacatgtttttaatccaatcgctcaataatcgtcgcgtttgccatcccataaccttcgcacatggtttgcaagccgtaacgatcgtttgttcgttccagttcgtgcaccatcgttgtcataagccgcgccccgcttgcgccaagcggatggccaagcgcaatcgcaccgccgttcgggttcagtttttccggactggcgccggtttctaaaagccaggcaagcggtacggaagcaaatgcctcgttcacttcaaatacatctatatcatcaatcgaaaggcccgcctggtgcagcactttttccgtagccgggatcacccccgtcagcatcagtgtcggatcggacccgacaacggcccgggcgagaatacggaatcgcggcttcaggccgagtgactctgcttttgtgcgggacatgattaaaacggcagctgccccgtcgctaatctggctcgcattgcctgccgtgatacgcccgtcttcctgaaaagccggtttcagcgcggccaatttttgaaccgatgtatctgcacgcgggccttcgtctttcacaaccgatacggctatgccatccggctgttccgcttcaaccggcatgatctccctgtcaaaacgcccttctttttgcgcttgcaatgcacgcctatggctttccaacgcataatggtccatcttttcacggctgatgccccacttttccgcaatcaaatccgcggacagcccttgatggatcatgttgtattttgctgtgagtaccttgctaaattgtacgccgctcctgttggacccgatcggaacgcgtgacatgctctcaaccccgcctgcaatcaccacatccatatcgccggaaagaaccgcctgggctgcaaaatgcaccgcctgctggctggatccgcactggcggtcaatagtaacaccgggcacttcaatcggaaatccggcgatcagcgctgcctgccgcgcaatatcagacgcctgttccccgacctgggaaacgcagcccatgatcacatcttccaccaaatccggggatatccccgttcgtttaaccacttcctgcaaaactttcgccgccagttcttccgcccggatcccgcttaataatccgttccgctttccaacgggtgtccgaaccgcttctacaatgaccgcttcccgcatccgaattcccctcaccataaaaattttccactccgcttacaccctgcgttttccaaacctgcgattccgtttgtaaacccgcatttgcacgggcctttttgaaaaatggtgcccggcccggacgaatgctttgaaaatcttatttatcggcacgttaagcaaacgtccaatccgccgggcacgtgcggtttcagatatgtttcccgcatctgcctaccggcggatttttccagcgccagctcacacccattacttcggctgcatccggatcgcaccgtcaaggcggatcgtttccccgttcagcatcgggttcaggacaatgctttggacaagctgcgcatactccgccggccgtccgagacggggaggaaacggcgtcattttgccaagcgcatcccttgctttttccggcaaagaagcaaaaagcggcgtttcaaatacacccggtgcaatcgtgacaacacggatgccaagcccggcaagatccctggcaaccggaagtgtcatcccgacaatgccgccttttgacgcgctgtacgccgcctgcccgatctgcccttcaaaagcggcaaccgaggctgtattaatgatcagccctctttccccttcctcgttcgggctgttctgtgccattttttcagcggcaagccggatcacattaaaagtgccaatcaggttcacctcaatcactttccggaaagaggcaagatcatgggcgccgcttttgccgtatgtttttttcgccgctccgatgccggcacaattcaccagaatgttaacgctttcaatttgttccagggcatattggacacttttctcgtcggttacatccgtttggaaaaagcggacacggccttttagttcctgctccaattttgcccctttttcctgctgaaggtcaaaaacaaccgcctccgcgccgctttccaccaattttctcaccgttgcttccccgagtcctgatgccccgccggttacaatggctgtgctgttttccagattcatttggccaaacccctctcccgtgaaaatccgttcatatctaaaattctaaatgtttgtattttcgctgtcaaccgaaaaaaaccgctcaaaagcggttttaatgttccagcaaaaagttgacgggaacgctcatttttttatccggatggtcaagggtatgcaccgttgccgtttcttcctgccggtcaacgtgctcgatgtaaatcctttccccgttcaaggtgaccgtcaccatttccggcacgttcataatttcctgcgcacgtcttgcatccatatcaaaacctccgtttctttttataattaaagtatggataggggggtatgaaactataccggcatttaaacatccgcctcttcctgtgctaaaataaaacaaagaacagaaacggagatgatggggatgaagtcttttaaaatcgtgcttggtgatattacaaaagccaaaacggacgccatcgtgaatgcggcgaatacaacactgcttggcggcggcggcgtggacggggccatccacaaggcagcagggcccgggctcctggaggaatgccggaaattgaacggatgcccgaccggcgaagcaaagataacgaaaggataccggctcccggcaaaatacgtcattcatacgcccggccccgtctggcagggaggcggtcatcatgaagccgaattattggaaaacagttaccaaaacagcctgcgcctcgctgaatcgaaagggctgcggacggttgcctttccttccatcagcaccggcgtttaccattacccggtggatgcggctgcccggatcgctgtccgcaccatttgcacattccttgaaacttccggctccgtccaggaagtttggatggtttgctttgacgaacggacaaaacaagcgtatgaaaaagcagcaacagaatgggaaagaatttcacataatggcgaaaaatccggcaaaactgtggcgatcctggtgaattgagtcaatcaattgcttttaccagcatgccagctttttttgcccgggccggcacgtgccggaaaagcgggaaagaagacattttcacaggtgtttcgcagctgccgccgtttttccacacccatgccgttttaccggaaacttactttgcccgtcccgctagatcccgggcccggattcttccctggtttaggggcctgcagccgcttccaattcggaaaggttcttatattttctggcccggtcgatcttgcttttccgaatatgaaactgtttaacagcgtattgccgcatcatatccggctcgaatacaatccgcgattcaacatttgactgttctctttgtaaaaccgccagtccgacaaggtattcgacaacgccgtaagcgtgcgcccacaactcatccatatagtcatggaacaatttaaacctttcctcatttccgaccacaagccgctgtatcgtataaatgccaaactggatatgcctgccttcatccatatttaaataatctatgccctgtaaaatgcccgggaacaagccggcttttttataaatctgcctgaacgaataataaccggattccgcaagcaccccttccacaatcatattgtaaaccgccgccgcacggatgaccgcttcaggcgaatcgtctgtatagaggcgttccattgcttcgggcagcgcttcgtaaaaaatccgcttgtaactgtcgttatggtaagccgataaatcaagatcgccgacgcccacagcctgctgccatcgcgaaaacatttccgtatgtttggcttcatcgtgcagatagctttcacaactgattatatattccgaaccttccaaggccaattcctatatatgtagggaaaacgtcagcccggtttgccgcttgccctatatttatcgcccgcctaaagccttgccgatacgcaaatccgcgcatccggtttcggtttgcctgctgcacgcctgttccttcgtcgcaaaaaaatcatctgcttcttaaactgaagcagatgcgggcatatcagggcaaaaaatataaaattttaccattctccagccggctcgaaattttcccggcggattccagataaaggcatcttgtaatcgttgtcataaacggcgcaaaaaattgctttaatgcgacatcgccgtatgtatcccggcagatttgcgccgctgttttctccccttcctgaagcgacatggtcatttgcttgagcctgtgctcatggcgcatccggatgctttccgcccgcgcctttacatcgccgatcagcccgccgtgccccggaagcgccactttggcagggaggtctttaatccggtcgagcgaatcaaaataatccccaagcgggtttttgtcgttttcagaccaggcggcaacaatgggggacaagtcttttaacacatggtctccgagcaccagtatttgctctttgcgattgtaaaaacaaaaatggtccggcgcatggcccggcgtccggatcgcttcgtaaggatcatccccgagcaggacctgttcgccatttttaaaaagcccgtccggttcaaaatcatatttcgggatctcccgagcaaaattccgtttcggcaaagccggcccgccatgtttttgcaaaaccgcttcgtatttatcatgtgaagcggcaaaacgggcctttgtttcctgcatggcctgaaagcttaaatcggacatgaaaacaggcacgctgtatttttctttcagccatttcgcaagcccgagatggtcgggatgcgaatgtgtcagcacaattttttcaatgggaaaaaccgatgccagcactttgttccatgtttccttcgccgtttcatggcagtcccctgtgtccacaatggtgtaccctttttcccctttaaaaagatagcaattgacctcccgcatgccaaacggaaaacggacgaccagtttccacacattttccgccactttcgtgaagtcgcacgaatcctttttttccgtaaaacttgccaaatccatcccctccttctataaggataacttttcggaggggcgggggcaaattttttcactttttttaatcatacgcgtaatgccaccaataaggcagatggcgcaaaaagtgcctgcttttttgggttggcctcaactgtcacgcaaaatcacctgttcgatcggttcttttgcaaattcaatgccgttttcgcggaacagccggacgatcacatggcgcatttcattttcaatcccgtctttctggctgcccggcaaaagcgggatctctacaagaaaatcaaagctatggctccgcagccggatcagctttacagacgcagtcgtatccggcgccagactgtgatctgcttctttcactatttcaaaagcctggtgcagcagcttttccaccttttttgtatccattccggaactgacgctgacctggatagaggcagagggcttttccgtcgtccggtttttaatgacctgttcaataaaatattgattcgggacaatcagcgtgccgcttttatcgagccggaccgtcgtggcacggagattgattttttccactctgccggtttcctcattgatttcaaccgtttccccgatttcaatcgggcgttcaaataaaatgatgatcccggatacgaagtttgaagcgatgttgcgcatgccgaagccgagcccgatcccgattacgcctaaaaccgccccgagcgcggacaggtcaaggccgaccgttgtaaagctgatacaaagtgcagcaatcatgacagtataataaatgaggcggttaaatgtatacccgagcccgcggtcaacgtggtaatggtcataaacggttgaaagcacatattttgtcagaagcttcacaagccggtgcgcgagtgtgacaatcattaaagcgacaatcagcaaaaacggcgtgacatcaagcccgcctttggaataaagcgggtaaaacaaccacctgttattggagaaatcaaacaggaaaatcatcagcacaccgtataaacaagcccagtttgtaatcgaataaaccgccggcactaccgttttttgcagccggcggttccttttggctgcaaccgataccgtccacttcagcagcttgccggcaacaagcagcactgccgtacccagcgcaaaacgaaaaagatgaatgtccgagaatgctttccatactgtatccaacaacataaccacccggttccaagatgatattttttctataccctgaaacctagcattcaatcgttacaagccgtatttccgcagtttcctgtaaaatgtgctgcgcggaatatccagcattttcgccgctgccgccgcatttcctttcgtatgtttcaaagcttccaggatcatatcgcgctcaatcgcttcccgcggggtcagcggtgcgtcctgtttttctttgccgcaaagtccagtctgcccggaaacatattcgtccacataccgttccgcttcttcttcaccggccagtgcaagcagccgcacattttcgatcacattcatcagttcgcggatattgccgggccaatgataatcctgcatttttttcaaaaccgccggtgggatttcgaagtcttgattttttttcctgccgatatactgaatcaaagcaggcaagtcttcttttctttcgcgcaaggcaggaaggcggacgggaaaaacatacaggcggtaaaacaaatcttcacggaacttcccttgtttcacgagcttcggcaaatccttgtgggtcgcggcaatgatccggacgtccacagccacttcttttgtggcaccgaccggcacaacttttctatcctgcaggacgcggagcagcgccgtttgcatggcaggcggcagctcggccacttcgtcaagaaataaggttccgccatgggcctgctcgaattttcctttatggccgccccgttttgcgccggtaaacgccccgtcggcataaccgaaaaactcgctttccattaattctttcggcacagccccgcaattgacggcaataaacgggccgtttttccggctactgttttcatggatggcacgtgcgaccagctcctttcctgtcccggtctcgcccgtgataaaacaagtggtatcagaaagggaggcaatccgggctttgcgcaacgtttcctgaaaacttttgcttatgccggtgacgccgcggaagacgaacctttcttttggaagaatggtaccagaaagatttttattttcagataaaaagaaacaagtgccgattttttcccggctggaaggcaatggaatggattggtttacaatggtatccgtttgggaggtcaattcttcaatcgttctgccaaaataatccggcaatttctcccggagcggccggcttgccgccacggtttttccttcttcatccataatggcgagtaaccggtccccgtactggtccgaaagttcaacagccttttggatgaaacgttcatgccggctttttgccaggcgtaccatttcctgctctgctgtataagcgagcgatgaaaccatggcgagcatgaaagggtgggattcggtatatgggcatgttaagtccatgacgccaacaagattcctttggctgtcgtaaaccggcgcagccgcacagctccactggtgggaggcaaccgaaaaatgctcagggccgttcaccatcacggcttcccccgtctcaagcgcagtgccgatcgcattcgtgccgacccgctcttccgtccaacaaaccccttcgacaaaattaattttttgcgcttcaaaaatggttttccggtttcctgatacggacagcacatgcccgcaaggatcaatcaggagcgccatcatgccggcttcctgaaacacaggctccatctttttcacatggcgttcggcaatatttaaaaaatctttatgcctttcccggtgtgccaatagtttttcaaccggcaggatatgctgccctttccgcaaataggggttaacatcccgttttttacagcggtaccacgattcagcgatccggttgttgattctcccagaatccaatatcccttcctggacaaactttttccacgtattccaataacatacagccatctttcatccctccgactcatcatagaaaattgcgcatcaggaagaaagtcgtgatgttcttttctattataatcgaatgtggaaagcgttttcaatatagaatgaatatgcccggcagtcccaaactgccgggcatggttatacgtgcaccggatggccctgtgcgtttaaaacggcttcgtggatagcttctgagacggtcggatgggcggcaatcaagcgttcaagcagatcagccgtcatttccccgttcagcatcaataccccctgcccgaccagttcggttgcatgcgggccgcaaatggacaggccgaccacctcttcgtattccggttcgatgatgactttcactttcccggcctgttccccgctgatcatcgcctttccgtttgccgaaaacggatattcgccgatccggacagcaccgtacacttctttcgcctgcttttcggtaaggccggttgcggcaatttccggaaacgtataaatacagcggggaacggccttataatccgcacttgcctcgattcccgatgcattgagcgcagccacttttccttcatggaaagcgacatgcgcaagctggatgccgccaatacaatccccgcaggcataaatatgggggatgttcgtctgcatcttttcattgactttaatgcccgatttttcatacgccacctcggcattttcgagtccgatcccgttgacagacggtttccggccgattgcaaccagcacatgcgccccgtaaatctcgcgcgtgttccctccctgctcaatcagcacacatttcttgtcacggtccagttttttaacggcagccgatgtataaatatccaccccgtctttttcaagctgctcttttaaaatacccgcgatatccgcatcttcccccggcaaaatatgcgcggccatctctatgatcgatacttttgccccaagccggctgtaaatgctcgcaaactcacagccgattaccccaccgccaatgaccacgagcgatggaggcacgctgggaagagacatggcctgcgtgctgtcgatgatccagtttccgtcaaacggcgcaaacgggagggctgccggttcagaccctgttgcgatgatgaactggtccgcttttatttcaaccgtgccgtccagcgtttctgcaaggacaacatggggtgactggaatgccgcttttccctgcacgattttgattttgttttttttcattaagtaatggatgccctgcacaagccgggaaacgattgcatttttcctttcaagcagggcgggccagtcaatggacaccgcttccttgttcacccggatcccgaatttgcccgcttcccggatgtcccggtagcgccttgcactttccaaaagcgtcttggtcggcatgcacccttcatttaagcatgtgccgcctaagtttgcctgttcaaataaaatgacatccgcaccctgctgtgctgctgtaatggcagcgacgtagcccgcaggcccgccgcctaaaatcccgatggttcccatcctgatcccttctttcctacaaaagcatcgtaactggttcttccaaatattgcttgaccgtttgcaggaaggctgctgccggcgccccgtcgagcacgcggtggtcaaacgtcaggctgagcggcagccggctccgtttttcaattttgtccccgataaaaacagcttcatccgaaacggcaccgacacccaatatcccggcttccggcgggttcaaaataggcgtgaaaaattcgacgccgcttgcacccaggcttgaaatggtgaaagtggacccttgcatctcatctgccggaagtttcccggctcttgctgccgctgctttttctttgatttcttttgccagatcgatcagcgatttgctttcggcatggcggatgaccgggacaacaagccctttttcaaccgccgttgcaatgcccaaatggatttccaggtaagtgacgatggtgttatccataaacgcactgttcatttccggatggttttcgagggcaaggatggcagcccttgctgcaaaatccgtgatcgtcagtttgctgccgtaccgttttgcaattgtctctttcacttgcgtttgcagcgccaatagttccgtgacatccgctttcatcgtgatcgtcagctgtgcagccgattgcaggcttaaatgcatgcgttctgcgatcactttgcgcatgccggataccggtatgcgctgcggttcttctgccaccgcctggacggggatgtcctgtttgcggctttcttttgccgacgcaatggcctgttccacatcttcttttgtaatcctgccccccgggccggtccctattatatcttccggtttgatgcctgatgcttccgccattttccgcgcgaccggggaaattttcacgcgcgcttttcccggctttttcgggggcggtgcgggatgtgccgcctgtatttcttctttttggcctttttcttcctgcaccggggctgctgttgccgccacttcttcatccggatttccgatatagcaaatcaccgttcccggcggcactccctttccttccggcacattgatttttaatacactgccgtccgcaggggactcgatttccatttctattttttccgaactgatgctggcgatcgggtcgccttttttaacggcttctccttctgttttattccactgtgaaacggttccttctttcattgccatcccaagtttgggcataatgacttcaaccggcatgccaaccactcctttctatctgtctgttattgcccgaccggttctcccaagagctctgataccgcctgcacaattttcccggcggacggcaaatacaaatcttcaagcggcggcgagaacggaaccggcgtgtgcggtgccgtgatccgtttgatcggggcatccagatcatcaaatcctttatcggcaacaagcgccgcaatatcggttgccacattgcaccgcgggttcgcttcatcgacgacaacgagccggtttgtttttgcgaccgactggagaatcgccccttcatcgagcggcgataaactgcgcggatcaatcacttccgcttcaatgccatctttggcaagccggtctgccgcttcaagtgcggtctgtacctgtttgccgaccgcaacaatggtgatgtcgcttccttcacgtttcgtgtccgccttgccgagcggaatcgtatagtaatcttcgggcacttccccttttatgttgtaaagcgttttatcttcaaaaaagataaccgggtcattgtcttcgatcgcagccaaaagcagccctttcgcatcatatggcgttgacggcacggcgacttttaagcccggaatcgatgtaaacagcgcatataggctttgcgagtgctgggccgccgcccggaaaccggcgccgtgcatcgtccggaccgtcaccggcacttgcgcctttccgccaaacatgtaccggaatttcgcgccctggttaagcacttcgtccagacagctgccgataaaatcgttgaacatgagctctgcaatcggccgcaatcctgttgaagcggcagccatcgcagcccccatatagcccgcttccgtaatcggcgtatcaagaatccgcccgcggccgaattcctggacaaggcctttcgtcacgccaagcacgccgccccatgcttcttcatcctgcagatggtcgacttccgcgccgccggcaacgtcttcccccatcaaaatcacgttttcatctcttctcatcgccagtttcatcgcttcgttaatggcctgcgaaaaagaaatttgtcttcccattggaaaagcctccttttttcatggattagtaggatacataaacatccttcaaaagttcggtagggtccggatacgggctgtcttcgccgaatttcacggcttcttcgatctcctgttccactttttgttccaggctgttgatgtctgcttcgctgagcaggttttgttcaagcacaaattttttaaattggacgatcgcatctttttcattcagctgcttcgccttttctgcttccgctttataagtctgggcatccccttcaaaatgtccgtagttccggtacgtcacgcattcgatcagcgacgggccttccccgttgcgggcgcgttccaccgcttcttttgccgcctggtacaccgcaacaatatctttcccgtcgacacggacacccggaatatcgtaagcaacggcgcggtcggcaatcgttttgcagcttgatgcataatggaatggcgtcgcttccccgtagccgttattttccgccacaaagatgaccggaagtttccatacggctgccagattgatgccttcgtgaaacgtaccgtggttatttgcgccgtccccaaagaagcaaacgcttacattatttgtctttttatatttcgctgtcaatgccgcgccgcaagccagcgggaacccgccgccgacaatcccgtttgcgccgagcatgcctttgtcgaggtcggcaatatgcatggaaccgccttttcctttgcacaggcctgtcgctttcccgtaaatttccgccatcatcccttttaaatcgcagcctttcgcgatacagtggccgtggccgcggtgtgtgcttgtgatcatatcctggtcatctaagtgggcgcaaacgccgaccgcaaccgcttcctcgccggcatacaagtggacaaaacccggtaaaatgccggtcgcaaacacttcatgcactttgtcttcaaacttgcggatttcaaacattttttgcaacatccactgcgctttttccttcgtgatctgcagttcgcccgcttttactgtttccatttatccatcctccttatcgtcacctttcactttgtaaataagcaagaagtgtgccaactgaaaaccccgctttcatcccgtttcttccaggcggcacataaaaaaatgagacaaaccgggacagctgtctcattttgtctcattttttcccatattttcttatccgctgatttctgactttttcatcctccatgcagccggcgcaaccgtttttcgtgacatcaggctgtgcagcaccatgccggctgcaaccgtgaggatgccgaaccgggacaacagcgatggcgccgcaaccggtaaaatggccatctccccgaacagcgcaaacagcacttccaatgactgggtcgcttccacaagcgataatttttgcatgtcaccgcggacaagatcggttgcccggaaaaacaataccgtggcaatcaccccggaaaagaccgcaaccacgcctgattgcacgatttggtttccggacggcgggccggacgcctttaaaccgtacaatgacaggataaaccagaacggcaggctggcaagcgtcatgccgagcacacgctggaatgtatcgagccggccttcgcacaattccatcattttccggttgcccaaaggataagcaaaagtcgccacaatgactggaaggacacccagtatcatttcccggaagctgatccggccggcctgctcaagctgcatcatcaaaacgccgagcaaaatcacaagcgaccagcgcaagccgcggaacgggatgggctcccggatttttagcaggccctttggcgtctccaccgttttaaaaaagaacggggcaagcagcgaaccggataaaatcgtgatctgccaggtggcggccacgagccatccgggcgcataagctgccgaaaaacataacggcgcataaaaaagaacaaaaccggtaaagctccacaataacaacccggccggatgctttttcatttccgcccataaggctttaaaatttttcctggcaagcacgatcacaagcaaaaacggaaccatcaaaatgtaccggagggaggcgctccaaatccagctgccgcccgacagttccatcgaccggtttaaaacaaatgtcgccgcgaaaaagaaggcggcacatacccccaataagaccggacgcaacatctcccacatcctttttaaagcgttttaaagaaatcccgcatgcggggcattcctccatatcttatgaaagcggccatgttttgagctcgttccaatacgtgcaaatggtctggatgcctttatcaaaattttcaagatggaaatgttcgttcggcgcatgggcattttccgacgaaagggcaaatcccatcagcacgaccggaatttttaaaatgcggtcaaattctgcgacaatcgggatcgacccgccgccccttgtataagtaaccggcacgccgtacactttttcatacgcttttccgcaaagctggatggcaggatgcttgcgcggcgtgacatacgggtaacctttgtcaaattcggttacagaaacggttacgccttttggggcatgggcttcaatatgttttttcagcaacgacagaatttcgtacggatcctggtttggcacaaggcggcaggtcactttcgcaaaggcttcagacggcaaaacggttttcaggccttccccggtaaaaccgctttgtaagccgttgatctcaagcgtcggccggacggatgttctttctgcgtacgagtagcctttttccccgaacaatacaggcacgccaagctgcgcctgtatttggctttcatatgccgcctgttttgcgaacgcttctttttcttccggcgtgcttgcttccactttgtcataaaagccttccaccaaaaccctgccgtcctggtcatggaaggatgccagcaattcaaccagcgcagtggcagcattttgcaccccgccgccgtattcgccggaatgaagatcgcttgatgcgccttttacatggatttcaaggccgcataagccgcgcagcccgtagcagatcgtcggttttcccaattctggcatgccggtaccggaaacgacgatcaaatccgcttttaaaagttcctgatgcgcttctgcaaatggcgcaagattcgggctgccgatttcctcttccccttcaaacaacactttgatattgacaggcagttccccttccgtttccatcagcgcctcgatcgctttgatatgcataaacacctgccctttatcatcgctcacgccgcgggcaaaaattttgccatcgcggatctccggtttgaacggatcgcttttccagaggttcagtgggtcaaccggctggacgtcgtaatgcccgtaaatcaagacggtcggcctcccgtctgcgtgaagccagtcgccgtatacaaccgggttgcctttcgtttccatcactgcggtatgttcgagacctattttcccaagctccgctttcagccattccgctgcttttctcacatctgtttgatgttcggataaggaactgacactcgggatttggagaaaatcaaacagttcttttaaatgctgctcctggtgttcctttaaatattgctgataggtttgtggcattcctatacctccttgcttggagcattttttggcggtattagctattcgccaagctcaccacacccaaaacgaggaacctagaggttgagcttgctctgaatatgataccgccaaaaaccgccagtgcttccgatcaagaaaaagctctttaacaaagtattgtaacgctaaattcgtggggtttagcccccacacgactagccagctacctccccaaaacaagggaaaacaaaaagaacacacttctacttaagtgtgttctcaaaaactaaaataattgagttgttaagaaatctaaaagataaccaaaaaacattactagaaaaaaactaaagaatgttatggtattacctatgattaaaactttagattttatacttacagcgagaagaagcccaataccggaaaaaacaaatgttaaaatccataaaaatgatggttgttgaaatacaatattaggtacccaaagcaataaggaaataattatcgtaattgtagctagaattttaataatagtatccatatactccctccttgtcatgctttctctttattgtaagacaagtttcattaattttccaatttattttgaaaggcggcaaacgaaaaaaagaaagcaggagccctttttttggcagctcctgctttttttattcctccgtttgattcgcaaattccgccatggctgcggccataaacgttgcaagcccttcgccaaattgatcaatgttttttgtaaaccggctgtcttctatatacatttggccaagccctttaaaggcttccggcgtataattcccgaaatggcggtttaaaaaatcaaaccatttccggatcgctgtctgcgctccttgtgcgcgcgggtccgtatggcggatggcggcaagctcacggtaaatcccgttcatttcagcagccaaggtggatttttcatccccggtcagccccgctattcccgcttccgctgcatctactgcctgatcccccccatttttcgcgtgcctcacgcgcatacggattgttgtcaaagcggaaaccggcaaatttttcttcactagacatttccattccctctttctccgattggattgttttttcgatcaaggcaatcattttcgcgagccgcttctgtttttcaatcagcaaatggcgctggagctcgagcgccccgagcctgtcaaacgaagggctttcaatgatttccttgatcttttgcaaagggaagcccaattccttgaaaaataagatttgctggagcgtttttaggttttcttccgaatagtgccggtaaccggacggtgaaacttcagccggttttagcagctcgatgtcgtcataatggcgcaatgtccggatgctgacgccggccagctctgcaacttctttaatactcatcgtgcagccccccttccttttttactgtaaggggtgacgcagcgtgagggtcaagacattttttcaagtttttcctggagggcaaacagcacttcgtaaatttttacgaaagcttccatgagcggcatttcttccttgaaaccgggcacatcgttcaacggaaagttcacatcccagatgccttcattgccatcaaaaacgatttcccctttcccgtctccttcgagcagttcagacaatcccgtttgaatcgccggcccgtatttcttctgcactttgagcccgagcatgcaattgtaatggccgaagacatcatccagctcaagggcaatcccgtcgacgccgatgatgccaaaccagtctgacacgatgtagacatattctttcctatgctttttcaaatagatgacaggttcatttaaaaacgccgccgtttccaccgcaagggtctcatcggcttccttgctgcaccgttcaatagatgcatcggcaaaacgggcggtaccctctttttcaacaatttctttttccctgacagcatctttgaaaaaatccttatagcgctccaaatacgctatttcttgtttacataatattattatagtatccttctggttttcgatatatgtttttaaattttttcccagcatggcaaccatcctttatgaggtattctgctaaacagtatgtcccaattggaagcctttgtaaagaaacaaaaaactgtgcccggagaataaaatccttctaggcacagtttgtaaaattatttattcaccgctgccggtttatgaaaatcacgtccgtcacggatcgcttctacaattccggcgcggatgacgaaatccccgaaatgttcgccttcctgccgttcttttgcatattgcaaaagaatcgggcgcagtgacgcgaggatctcttcttccccgatattttccttataaaggcaagcaagcctgtcgccggtgaagctgccacccaaatacaaattgtattttccggggccctttccgataaaagccatttccgcaagcgccggccttgaacatccgttcgggcagcccgacatccggatgacgatttcttcttcgcgcagccccgcttcgtccaaaatctcctcgatttttccgagcagttccggcaagtaccgttctgcttccgccatcgcaaggccgcaagtcgggaatgcgacacaggacatcgagtttcttctgagggcggaagcatgcttgccgtccgtcagatggtatttttcaaccagctcgccgatctttcctttcatttcgtcggtgacattggaaataataacattctgattcggggtcaggcggaactcgccctgatggatttttgcaatttcgcgcagcccggtcatcaaaggatagccgtcaaagtctttgatcctgccgctttggacaaataacgtcaaatgccatttgccatcgcctttgatccagccgtaacggtcgccgttatggtcaaaatggaacgggcgggcctccccgagatcccagccgagccgttcattcagttccgccttgatccattcaagcccccgcgcgtcaatggtgtacttgaaacgcgcatttttccggttcgcgcggttgccgtagtcgcgctggatcgacaccactttttccgccacttcaatcacctggttcggcgtgcaaaaaccgatgatccgggcaagctgcggatatgttttcggatcgccgtgggtcatgcccatcccgccgccaaccgcgacattaaacccttcaagcttcccttcattcaaaatggcgataaaccctaaatcctgtgaaaaaatatcgacatcattggaaggcggcacagcaaacccgattttaaacttccgcggcaaatacgttggcccgtacagcggctctgcctcttcctgctcttttgtatcaatgattttttcatcttccagccagatttcatgatacgcggaagtccgcggcaacaagtggtcgctcgtttttttcgcccattcatacacctcggcatgcacatccgactggtacgggttcgggttgcacatgacgttccggttcacatccccacacgcggcaagcgtcgtcatgagcgcatcgttcatttcccggatggcctgctttaaattccattttaaaatgccatgcatctggaatgtctgccgggttgtcatacgcagcgttccgttcccgtatttttgcgccagttcatccatcacaagccactgttccggggtcgcaacgccgcccggaatgcggacacgcaccataaactggtaagccggctccagtttctttttgcgccgatcgttgcggatatcacggtcgtcctgctggtagctgccatgaaatttcaacagtttattatcgtcttcggatatcgcgccggtgagcggatctttgagcccttccgcaatcgtccctcttaaaaaccggcttttttcttttatcgtttcaagcggatcaagttttttatcaaccatcttcctgcccctctctgttaatacacatcacgctggtatcgttttgcccgtcgcatttcctgtaaataaccctctgcctcttccctcgccatattgccttctgtttcaagaatttgaagcagcgtttcctggacgtcgcgggccatgtgcttttcatcgccgcacacatacacacaggcgcctttttcaagccatgcataaaaatctttgcttttttcaagcatccggtgctggacgtatattttttctgcctggtcgcgcgaaaaagccacatccatccgttcgagcacgccatttttcagccagttttgccagtcaagctgatacagaaaatccgtcgcaaaatgctggtccccgtaaaacagccatgttcgtccggtgatcccttccgcttccctttcttccaggaaagaacggaacggcgccacgcctgttcccggcccgatcatgatcaccggtacatccgggtcagccggaagtttgaaattcggattgcggtggacataaaccggcagcttgtctcccggttttatcctacctgcgatttgcccggagcaaaccccttcgcgcacccttccgtttgctgtatagcagtccagtgcaatgacaagatggacttcatcggggttcgctttccagctgcttgcgatcgaataaagccgcggcggcattttccggagcatttgtacgaaagcttgcacttccactttttccggcggatattcctcgacaagatcgagtaggccccgcccttcaaggtacgcctttgcctccgcttcattttcaagcaaagccgtaagcgctttgtttccgaaaagcacggctgcttgctgaagcagcggttttgttaatctcgtaatttcataatgtctgagtaatgcttccctggccggcagcacttccccttttttattgaccggaaccggttcttccggatcccagccgagctcttcgatcaaccgttccacgagttccgggtcattttccgggtaaatcccgatgctgtcccccggttcaaatgtaaaaccggacccttcaagggatagttcgatatggtgcgtttttttattggacccttcccagttcaagttgatattttccagcacttccgcctggaacgggttggatttggaataatcggtgtttgcaggccgggtggcatccgcagcggttggagccggcaaggcagatgcccggagcacgcctgcaaccccttcaaaccattcgcgggcgtcctcttcataatccacatcacaatccacccgcggatagagcctttccccgcccaactcttccagcctcttgtcgatctcttttccgaccttgcaaaaaaaatcatatgtctggtccccaagcgccaaaactgaaaaagggaccccgtccagtttcggggcttttctgctgtggatcagctcatagaaagacaatgcgttgtcgggcgggtccccttccccttgtgtgcttgtaatgatgagcagataccctgcattttttaaatctttcggcttgaccgcatcgagtgccgaaaaagatacggcaaactgcatttcttttaatctggctgcgaattcttcggcaagcgcctgggcattgcctgtctcggaaccaaacagcagcgtaaccgctttggttgccgtctgtaccggcttttcggcaacagctgtacttcccgggggattcgttccttgttcggcaaacggatatgttaaatatccgctcagccataatttttgctgatccgttaacatttgcagcagttcatttaacttttccgcctgttctttactaaacgggctgttttgtacacttaacggcaaatcttccacctcgcaatgtttgcatgcacttttcaattgtttaattatatatgacatcctaatccaaatagacataggcgtttacttggattttaatccgcttcttaccatgagaagcgccttcgaaaaaagctcttcttacaaagataagaagagccggcgcacaatggtcaacttctcttatctttcagacgattgtctgcaggaattggcacagtgtttttcaacctgttgccgaggcttcaaagggcctttccctccacctctctggataagaagaacgaatcattatttagaaatcattgaaaacattatacaatcaaatgcggcgggagtcaattcttttttgaacagacgggggcgataaaaaaagaaaagggtggcaagttccgcatcaagcgtccctccaatatactttatgtatcttttgcatagaatgaggggggaatggatgaacatccacatttaccaggggaatgagatcacgccggaagacggggatgccaatattgtgatcgatgtgatccgcgcgtttacggttgcccaccatgcctttttgggcggcgtaaaagagatatggctggcagactcaaaagaagcggctttttgtatcaaagacaaatacccgcatgtcttgctcacgggcgaagggaacgggcttccgataccgggatttgatttgggccattcaccggccgccatcgccaaacagccgttagccggcaaaacgctggtgcaaacatccacaaacggggtaaaagcagccttccgcgccctttgtgcaaaggaagtctatgttaccggcttttcgaatgcaaaaatgacggcaaaatgggtcctgcgcaaatggaaaggcaaagacaacgcccgcatcaacatgatcgcttcccatccgacgggggaagatgacctggcatgcgcattatacatggaaagcatcatcaatggcgcggagacgatcaagccggaatcagtgatcaaggagattgtaaatgccagtgttgcaaagaaatttcttgatcccggccagcctgcatttaacccggctgacctggaattttgcagcaacgaaacagactgcgggtttgttatgaaaattgatccaacaggagaatttccaacgatcgtgagggttgaagatgaatgaccatggtttgacactgcctttacgcaatgagaaaccgcgggattgcggaatcaccatcttaattgacaatggcattccgctgaacttttttaaagataccatgaacagtgcagccccttatattgatttcgtcaaattcggctggggaacatcggtggtttcgcgccatttggaagaaaaaatagatcacctgaggcaaaacggcattgccttctttttcggcggcactttatttgaaaagtttgccagccagggaaagacggatcggtacgttcaatactgccggcggtttgcatgcgaatatgttgaaatctcaaatggcaccctgccgctgtccaatccggaaaagtgccattatattgcggaattttcaaaggagtttaaagtgttaagtgaagttggctcaaaagatactgccaaatcaatagccgacacgccggcgttatggctggaatcgattagtcaagatttagaagcaggcgcatataaagtgatgacagaggcaagggaaagcggcacgagcggcatttgcaacggggacggggaaatacgggaggagatgtttgcggccatcctggactccgggattccccgcgatgctttcattttcgaagcgcccaacaagcagctccaggcttttttatccaacagctcggcccggatgccaatctggccaacatccctttttcggatgcccttgcgcttgaaacattaaggctcggtttgcgatcagatactttttttattggaggagattcccatgagagaaacggataaaatttttcatttggcgatcccgtgcaaagatcttgatgaaacagccgatttctatcagaaattaggctgtaaggtggcgcgccggtatgatgaccgggtcactttcaattttttcggggaccaggttgtctgccatctgagccctgaaaaaatagaccccaacccgaaaatgtatccccgccatttcggcattacttttttggataaagcagcatttgaggaaaccctccaatccgcaaagaaaaaccgcttggcatttttccaggagaaaatggtccggtttgggggcaggcaagaggaacattggacatttttcctccaagatccctccaacaacttgctcgaatttaaatattaccacgatgaaagcatggtgtattaaccagtcccattcattgctcaaagcatgcgatgcggctttttccggaaagagccgcatcgcatgctttgccatttgggccaggcgataagcgttttttcctggcccgagacgtttgatcgttatgttcagcaggatggcaaagccccggaggccctttttaggcttaacatgcaaaccgcaggcatacagctgcggtttttttgcggcttcccgcaggaacatgcagcgcttgaagcgaataacatactctgcatgttccgccacccggttttgtgatcccatgctggcggaagccaaagcgatttggcttccagaatgctccttatttattttctaaatggacaaaagcttttgcggcattgacatgtgtttttgtgatctttgtctggtacagccaatccgaaacgtcttgccattttttcaggccctgatcggcaatcgttttatttttttcgctcatcagcggcagcaaaatgtgcaggctcttcgtttccacatttttatccagcggtgaagaggcatcttcatgttttaacaaaatggcaagcgccttttccggatgttttttgacatattgctggcctttttcggcggcagcaagaaattttttaaaaatgtctggctgctgtttcagcttattttcgtttgcgatgaaaacgagttcggcataatccggaacaccgtattttgccggattgaatgctctaacgggtacgccttccttttccagcagcagctgttcatgattaacaaaaccgccgacgatcgcatcagttttacgggctgtcagagcagggattaaatcatagccaacatccactgttttcaccttgtccggatcgcccccgtctgctttgaccattgtccgcacggctgcttcttccagcggaatggaagagtagccgaccgttttgcccgccaggtctttcggtgagcggatgccgcttgaagctggcaccatcacacggttcagcgtatggcggacgacggtgccaaaagattggaccggaatattctcatcgcgcgcgattaacacttggggttgataacttaatgcaatatcaattcgattcgcagccgcaagttttaacgggtcatttgtgtcagaaggcattttgatgctgacatcaagaccctgcgctttaaaatagcctttttcctgggctacataaagaaaagaatgaaccgcatttggataccaatccagcataatcgttactttttgcgcatgtttcgttgcttgctgcgaatgattgctgcaggcacctagcatacacgccagtacagcgaccattacccatcgtttcttcattgaacatccccctaaatttttgttctgtttttcaataagcttttttccatcccataaataagcaaaaataatcccatgccgagtgcagccaaaagaaaaacggccgaaaaaacagcgcccgactgcaaatacccagacattcgcttgctaaaaaagccaagccccgcagttgcgccaagccactctccgatcgctgccccgctgacacaatatacaaccgataatttcaagccggataaaaattggggaagggccatcgggacagaaagttttcggaaaatatcccaacggctggcgcccattgtccgaaacaaattcagataggcgggatcgacggtttttaatccgtcaaaagtgctgattacaatcggaaagatagccgttaacacaataatcgctaccttgctccaaactgaatagccgaaccacatcataaaaacaggtgatacggcgacaagcgggatcgtttgcgaaataacaagaaacggataaaagattttttcagccgttttggagacatacatgatgacaccgatcatcactccacccgcaacagataaaagaaaaccgatgccgacttcctccactgtcgcaggcaaatgcacatttattagttgcctgtgattttctatgaaagatgcatagatttgggtaggggacggcaaaatgaaagacgggatcacccctttctgtatgacccactgccagccggctatcaagaccagcatcgtaacgcaaaaaagtccgtaatcccccagccattttctccacttcatttaggaaacctcctttcatccgaacttccaatatgtacaagctgcaaaccgttccaaagcccgttcaaccatttgaattttttcctgctatagcaatcttccacctactttttgtttttatttcttcctgcttcattacaagcccgtcgtcattgacggggtttttccggttatcgccctaaaagcagctatttttcctcccttccaacagaaaaaagccaggcctgtaaaagacctgactttaataagcaagaaaattttcacaaatccctactttcctacgccggcatgatccggatcaggtccaaagggttgaaaaaccaactgtttttctctcagcccgccaatccgggcacccctagtagtctgaaatattcacttttttctattataggctttctatttgcttgtgtaaagtggtgcaggctttttgtatgtgtcaagtttttctcgacaaggtttaaatatcgggtattccaagacactctttttgtacactttcggctaccgtgctttacttgctcggtgtaattttcggaaaagatgtaatatttccgtataaagatggataacggggatgttgaggcgcgcgaaattcactcgctttccgcgggcggccagcgagcctcctcgctcgtacctcgctgcggggtctctcctggctcgcttttcccgcaggagtctcgtaaatttcgcgcgcctcaacgatcagtccccactgagccaagcttaaaacgaaagctctaatattctaatattttgcttaaatgtcccattgccgatgaactgcttgaatgcagggcaactgatccgtgctttacgcccactgacgggcgtacaggctgcttgagtagttgagacatcctgattaattgtttcaagttccgttgctttctctcgcttcttgaacggtgtttcagatagacttctctcaatgtcccattgagtatgccttgtttgattttcaccatggcttctgcgccaagttcactccaatgcatgccccttttttnnnnnnnnnnnnnnnnnnnnnnnnnnnnnnnnnnnnnnnnnnnnnnnnnnnnnnnnnnnnnnnnnnnnnnnnnnnnnnnnnnnnnnnnnnnnnnnnnnnngtaaaattttacacatacaggcttttttctatggtaattggttcgatagtcagggctcctgtttttaccaaaaaacccgggaaaaaaagcaaaaaacttttaatcatcatgatttgcctcttattcacgatatataagctcatttaacgcttcattccgtcatcgtaaactgaatagatagccattcagatatttatacgacagcggctgcggttgcaagtgctgacggaaacaaccacatcgccccctcttctcgtgcttgtatgctcacaaaaaaaaccaattttatgaaaaagatgaaaatagtcttgttaaatgacacaaatgtcgcttataattataaaaacgacacatgtgtcatttaaggaggagcataatgaagcattcgctttttaaaaatcattcctttctattcttaatcagtgcgcaaaccgtttcaaatcttggcgactggctgcatcttgttgcattgtttgcattagtggcatttaagtggcacgctgacccgattgcaatggcagacattacattatgcatggtgctgccgtcaattttatttggatcccctgccggctggctggcagaccggtttaaccgtaaagtgctgatgagcttctcggatttcgcccgctgcggttgtgtgctcgggattgctttttccgtttcgctttggcaagtttatatctttctatttttttgggctttttctcagccgtcttcacccctgcagaaagcggcctgcttcgccaagttgttggtgaaaaccaaatacaggcggcaatcggcacaagcgagatgatcaataacagcgccaaaatcatcgggccggtagcaggcggcgcattgatcagcctgaccggaatcaaaggcgctttttatcttgatgccatttctttcttcctctccgccctcctgctgtttggaatcaaggcgccaacattacagagcccggtaaaaagtgatctagaacatcgggaaaaggtctcgctaactgaaggatttcgctttctctccggttttcccgtgttaaaaataggtctgatcgttttttgtaccatgatactggccttgcaaatttctgattcccaggccatgatattaataagggatatcaagaacgcaacggtccattttgcgagctggtgtattgcggcaagcggttttggcatgcttactgcttccgtgctgtttacgaaaataaagttaggggagaaattaatcactttaaaaatcagccccgccatacttggtttgggttgtatcatggtaagtacgggtaccggctggccgatcggcatcattgaagccgtttacccttgcgtcttttttctgatgggtttttcttttacaatggctgtcattcctttcgatgtgctcgtccaaaagaaaacgcctgaaacgcataccggaagagtgttcggtaccatcaacagcctttctacactcgctgtgcttgttggcatattacttggaggctcgctttcagagtggtttggcgtccgtctcgcattcctgatctctggcggaaccacttgcctgcttgctgccgtttccgcaatcgcaatgaaaaaagcagaaaggaaggaaattcatgtcgccgagggtatcaaaacaacatcttgaagaaagaaaaaatcatatattggatgctgcgaagcgggtgtttgaacgaaaaggctatgaacctgttaccatgcaggatatcgtaaaagaagccggcattagcagaggaaatctgtatcagtatttttctaacacagaggaaatcatgcaggtggttattgaaaaaaatgacgattcattttatacgtacattcaagacctggcaagcagccatgaaaaagtatgggatgccattcaagcctatcagaaagtggttttccaaagtttgccaaatccttacgggatcgtgatgtatgaatactctgtcaccaggtggcgcaatccggaaagaaaggcatttttccaaaaaaggtatacccgggccatgaaaagctttttagcgcttctagaagagggcgtaaaacagggtgaatttcacccggtacagccgcttgaaacgattgtcaattttatggtgaacatatgggacggactgattttaatggctcatgtagaggaaccggaaagagtggcagtaggcggacagcttgaggcgttaaatttatacttaattcaggctttgcgccccgatgaaaatgcagactggcatttggacaccaagattgaacccggctgatacgaaccgggttcagatataaaacgatgatgatcgttatttacgcagttcgctatattgaatctgaatcctgttttccggtttttgatccactgtatataagataaacagaaaaaaccattccaaaggtttcatgaaaagatagacaaggtcagctgaccactttgtacggatatgcctgctgagaggataaccgtatttatcataaatatagcggatgaagtgatgcatacgcggcatgtattcttcaagtagatgttcgaaagcgttcgcaacaagcagctggcggttcacaggaattcttttgccgtgccggagccctgcccttaccggcttaacgacttttgtgtgacccctcgctgccacagaacataaatagtgttcgtctccctttaacatttccggagggggattgggtatcctggaataggtgaaagaacttgtatctaaaaacaaacggataaagctgtccggccgctgaccaaataatatgaggaccatttggacaataagcaaaacaggaaaaaaacaaatcgcccacaatcgaggcattttactataccgtacggaaattttaaagagtaaaagaagaaatcccttatactgtacagtctctttcctcatttttattgaaaactcattcagtgaatcttttaacttggtgatatacagtaaagcaaggcaaaataagctatattgaaatgctcggacggaatacatatcccccagttttgagaatagcgtatgtgtaaaataaacagtagcaaacccaatatttaaaaccagtatcgtactgctcacgacatagataaccggtgaaacccggccggcataaaaattcaatatcaggaacccagccatgcccagtacaaccaacacaatcgctgaaaagatatgattaggagccaatgaagcatagccgtccgcccgccctccaatttcataaacgtgcagctgttcgcctgcccttgcaccataagcgttcagataacaccccacgataaacaggcaaataagcacgactgcattcaccgtatccattgttttgactttgatggatggggctgcttgtgttccctttttaaaactggataggaatctggcaatcacatacacaggaatacagagaacaaatagggctaaaaacacaaaaaatacggatagaatatgatagccaaatcctaggatgtatgccgctgccaggaacaaaagcacaactgcaattaaacttatgatcacaattggcgctctgttgtttttcaatgcagtcccccctactacgctaaatgaatgcttttgaaaatgcgcccttgtagcgtttctttgcgattggatttccgaaaacaacagttaaattgatttgtttttccaggcctttggtttctttcgctatgcttatgcgtttttttaaagtgtctccccactccctttcctctcgaagttcatgcgacaaacatgccgtaaacatggcctttataaatcgatgtttctgatatgcgtcagcatcagactcctttaaaatacggatatgcatttactcctctcctgtccgctttttcttttatcgttaatgttctaaacctttcctgccatccggaacactttcccgtccatttcgggctttagccatttcattcccattttctcatagaacgaaatggcttgcttatttgtcggggatactctgagatggtattcccccaattgatgttttttgaaaacgctcatcgcatacgcatgcagttcagcgccaagacccgagccacgtttttccggaataagatagtacaagttgacatagccaatcggtttaccttcaaaatctttacgtgtcacctcaagctgtccaattggaacaccattttcaatcgcaagcataaaaccttccggaaatcgtacttgctgcatttcaagccattcaaggtactctcttgcattgaaatttgcatccgttccgaagcttacgataaaagaatcccttcggaacgggagaatatactggagatgctgcctgacttgaatgggaatgaaatccatttattaacctcctctcttgcttcctcctttgccagccctttatcatttcttttcgccccggcagctgaaatccatttatcaatcggttggcacaattctctattttcttatcgtcatctattgtagcacaagaactgcggatttccttcttttacattgtccgtttactttttcagcgtgaatcaacggtcaattatggatagtcatttttgaagcaatatgttatgttgagactgtaaaggatgcggaattgggtgtttagtgcaaaatgaaacgccctacgcttttccccttagaaaggaggtgatccagccgcaccttccgatacggctaccttgttacgacttcaccccaatcatctgtcccaccttcggcggctggctccgtaaaggttacctcaccgacttcgggtgttacaaactctcgtggtgtgacgggcggtgtgtacaaggcccgggaacgtattcaccgcggcatgctgatccgcgattactagcgattccggcttcatgcaggcgggttgcagcctgcaatccgaactgggaatggttttctgggattggcttaacctcgcggtctcgcagccctttgtaccatccattgtagcacgtgtgtagcccaggtcataaggggcatgatgatttgacgtcatccccaccttcctccggtttgtcaccggcagtcaccttagagtgcccaactcaatgctggcaactaaggtcaagggttgcgctcgttgcgggacttaacccaacatctcacgacacgagctgacgacaaccatgcaccacctgtcactctgtcccccgaaggggaaggccctgtctccagggaggtcagaggatgtcaagacctggtaaggttcttcgcgttgcttcgaattaaaccacatgctccaccgcttgtgcgggcccccgtcaattcctttgagtttcagccttgcggccgtactccccaggcggagtgcttaatgcgttagctgcagcactaaagggcggaaaccctctaacacttagcactcatcgtttacggcgtggactaccagggtatctaatcctgtttgctccccacgctttcgcgcctcagcgtcagttacagaccagagagccgccttcgccactggtgttcctccacatctctacgcatttcaccgctacacgtggaattccactctcctcttctgcactcaagcctcccagtttccaatgaccgcttgcggttgagccgcaagatttcacatcagacttaagaagccgcctgcgcgcgctttacgcccaataattccggacaacgcttgccacctacgtattaccgcggctgctggcacgtagttagccgtggctttctggccgggtaccgtcaaggcgccgccctgttcgaacggcacttgttcttccccggcaacagagttttacgacccgaaggccttcttcactcacgcggcgttgctccgtcagactttcgtccattgcggaagattccctactgctgcctcccgtaggagtttgggccgtgtctcagtcccaatgtggccgatcaccctctcaggtcggctacgcatcgttgccttggtgggccgttaccccgccaactagctaataaaaaacctttttttacatcacatcctttgctataatataaccattaagtaaaccttacttgtattggcttacttaaatgggtgaaatcctcgtctgttaaaatacgtgtccgaaacgattccaacagatttgaggatttttcttttgccgtttttttgagtgcttttaagattgacgaacctttttcaaacagctgtctaataatatctgttatttgaactaataaataatgatttttcatggctgtgtagttttggctattggcatgttctatattgtaacgattatttttttgttcgttaaatccttgattttcaatcttccagcggcttcttcctgcagcgatgagtcgttccacgttctttttcgtgattttaatatccgttataaatacatactctttcgatttcccatcctctgttttcattgtggcctccatcagattgaccgttctgtctttgtaggcaatatcattcacccaaactaatgaattctgatccttactttgttccagctcttttattgccttaaactccgtcgagatacttttaattctcccttccttaaatctgcatatatatttccatttgtgcgccctgcacagattaaataccgtttcacatgcatagagactatctcccaagatacaaatcggtagtcttttaaatattttttttattttctttgccagcctgtcgaaggcttttaattcacaatcttgcttagaaacattttctgattcattttcgataaattcggaggcaatactgaagaccatatcccccacgacaagcttggcttcaagtacatggtgcatataaagtacgttcgtttctcctgtttctttatttgtatatgcccgtctcaggcagtgtttacaatgtttctcatgaaaggtgtgtaatccagttccatcaatgatgacaccccagtactttccttcaattcgataagactcgagagacctttttttcaataattctttaatcatatacgttctaattttttctaattcatttacatctaagccagataaaaagtcgttaattgtatcataatgtggaagttcttcaagagaatctaagcctaacaccttccctacatttttaatacattcttctttattaaaactctcactcatgtttctcatggattttaggccggtcatatttttcaacatcatcgtaaataaaaggacctctggaccataagtgatatagctttgatgtcggtggtctgctaccttttttaggttattcatcaggtctttgaaaaaatgcttctgaattttaaggaactcgaaaaaataatttgcttctttttcacgatttcttttttcttttctagtaaccaaaataaaaaccccctcaaaacagccaagtttaattagggcttgctgaacgaatcaaattttagcttgtattcgacttgtcactaagccatgccaaaatattcgtccagcaagctctaattatttaaattattacatatttagccgcatttttgggggggatagttaaattatcacgaaaaatttttactcctcagagctgnnnnnnnnnnnnnnnnnnnnnnnnnnnnnnnnnnnnnnnnnnnnnnnnnnnnnnnnnnnnnnnnnnnnnnnnnnnnnnnnnnnnnnnnnnnnnnnnnnnnatgcggagaaaaaaactatccggtattagccccggtttcccggcgttatcccggtcttacaggcaggttgcccacgtgttactcacccgtccgccgctaaccttttaaaagcaagcttttaaaaggtccgcacgacttgcatgtattaggcacgccgccagcgttcgtcctgagccaggatcaaactctcagtaaagatgtttgataaaagctcaaaaagaatttgacgtttcgttttgtccagttttcaaggaacaatctttgctgtccttaacagcgacttaattattatatcaaaatatcaattcgctgtcaacatctttttttaaccccgttgtttatccacctaacgggtcagctcatttatcataacatttatccgtaacttaagtcaataagatagagcaaggtaatgttttccatctttttttaagatccctgctccttaatataatgaagaaacagggatctatgctacaagttaagatggcggaacagcattgagcttcctctgttacatacgtacaggtcgttttcagggaaccgcagtactcctgtcacagcagccgtttcttttatccattcccttttttcagccataatttccggaatggtttttgccagtcactggcaagcacctttacacttaaaatttcttctatcgcatcaaaatttgttctatcatggtatctgatgttattgatatgcaggatggaaagctgtttttcccctttttcaaggaggataaagctgtcatttttccggacaaaaccttcttcgagcacacgcatatagaagccggaccagccagtttccacaatatcggcaggaaaactgtccaatccgtgtttcgcagcaattttatagcaaggctcccgcggctgtgatacctgcacaaccgcttcccccatttgaaaaacatcgccgatatggatatctgcttccgaacatcccgagagcgtaatattttcgccaaatgcccccggctcaaaagtccggttaaatttcttcccccataccggaaaatgatcaccaacatacacgcagactgctttatccgctccgccatgatgcacaaggtccgcctgcttgtccccttcgaaattttcttttgccagatataccgggccttcctgtggtgttttaaaaatgccactctgcaccactttctgtttataggcaagcgcctttggtttgcctgtatttaccgaaacaacaacaccgtccgccatcatgcctgctcctttcccaaattgctatctaaattttaccatcatttgcgtaaactttgaaaaacattttaagaaaatcccgcatgtctcccgtttgactttccggattcgctgttttcaatccttttgcaaaaaggtttctaaaagttttaccgcttcattatattttagcgtaacttttcttgttgccgctgccggaataatagcaatttcgcccaggtgcttcaaacatttcgtctggccttgttctgccggtaaatgaaaggtgtagtcttccagctgaatgagcagcaatttctttccattctgagtatgatagccgatcatttcagccttattttcatcaagcaacttgcggaggacagcatcttttaatgcatacagttttaattgccgtgtttttgctctgttgaccacaccataattcctgtcaaaatagtttatcttttttgtatccctgctttttttagctgacttgttgataatatatagagattcagcgatgttatgaatcgtcatttcgagtttggatatgtccgtttgtctttgtttcacgacctgtgtttcgtttatatcgtacaaaggatatttttttccgcgatagccgattttcatcgctttgggttccccgacaggcttccgttttaatgctttcagctgtgtttttgttttcagattttccggtacatcctcccattttctgtaattttccactgcctctcccccctattcgcataaaccattctctgcgccttgccagcacaaaaaacaacaaatgatgagaggttatctggttttaacagccctcaccttcccttccaccggaatgtttgtttgtattttatcacaagaacaaacgttttatcaaccaagatattgaaaaattctcgcaaaaaattcaccgccattcagcctgcttggcaccaaaaaagccaggctcctacacccggcttatcttgattccatttttaaactgtcaaaaggcgcagggctttacgccttcattataaagcgagctcccttttcaacaggacagctgccgcttctgcatcttccgcgcctgcgatcgcagaaatgacggaaacgccgtctgcgcccgcttctatgacgctttttgcattgcccggccctatgccgccaattccgacaattggaatccggatgccattttggcggatttcgcgaatgacggttgtccctttcgccgctttcgcatcttctttcgatttcgtcggaaaaatggggccaacgccaagataatccgcgcctccgtttgctgcctgcctggcttcctccaacgtataggccgagacgccgatgatcttatcccccaacttttctcgtacggatgccagcggttcatcttcctgcccgacatgcacaccatcagcatccagttccaacgcaagtgcaatatcatcatttacaagaaaaggaatcccgtttttttggcatatccacttcaatttttcaccaagcgctttcttttcttcgccttttcgtgcaccgttccctttttcacggaattgaaaaagggtgacgccgcccctgatggccttttccagcacttgttccggcggcagcgtgcagttcgggctgcccataataaaatacagtttcaatgcgccacgcaaatattcggctgtcatccgtttttcattctccttttttggtacgcccaatggtttgtcggcccgtgcccgtgtccaatttgaatgccgtcttcgatcgcggcggaaatgaatgcttttgctgtcgacactgcagcaaatatatccgcgccttttgccaattccgccgtaatcgccgaagaaaacgtacagccggtgccgtgcgtattttttgttgcgtaccttttcgctgtatattcgtaaaaattcaccccgtcaaaaagcaagtcgctcgaaaccggggaagatgcgttatggccgcctttaataaggacataccgggggccgcaatccgcaatgatgcgtgccgcttccttccgatccccggcatttcggatgggcattcctgccagttcctctgcttccggaagattcggcgtcacaatgaaggcgagcggaagcagcttgctttttaaggcttgaaccgcttccttttgcaaaagggtttccccgccttttgcaatgatcaccgggtccacaacgagtttttcccagcggtaggttttgattttttccgcggccacttcgatgatgccggaatcaaacaacatgccggtttttagcgcatccgtccccatatctccggcaatggactccaattggcgggagacggcttcgggtccgagcggaaataccccctggacgccgcgtgtattttgcgctgtcaccgcggtaatcacggacatgccgtatacttccaattcctgaaatgttttcaagtctgcctggatgcctgcaccgcccccggaatcagaaccggcaatggtaagtgcttttttcatgacgttcatccttctttcttttcaaaagaggcatatttttggatttcttcagcccctatttctgccagctggtctaaaaatgccatttgaaaactgcccggcaaatccccgcctgttttttcccttgcgatttccgcagcagcgccgtaaatcgcaagcgccgaaacggatgcctgaaccggatcttcctcaacagcgagaaaggcgccgcaaactgcggacaaaaggcagcctgtcccggtgacttttgttaaaagcgggtggccgttatgtacgagatagagttcggaaccgtttgacaccgcatccgtcttgccacttaccacgaccgtagtatgaagcgtttttgccgcttttaaagcgagttcgcccgtatccaggctggtatctcctgcatcgacgcctttaactttggcatctattccgatcagattggcgatttctccggcatttcccctgatggatgtgaagcggatttctttcagcaatttttttgccgtttctgtccggtaacgggttgaaccggcagctaccggatcgaggacgaccggaacgccattttcatttgcagactttcccgccaaaatcatggcttcgacggctttttcattcaaagtgccgatatttaatacgaccgcatttgccgctttcgccatatcggcaacttcttccaccgcatcggccattaccggagatgcgccgagtgccagcagcccgtttgctgtgaaattagccaccacaatattcgtgatattatggataagcggattggcttccctgattttttcaagcagttcaattggtttttccttttccattttcattccctcctaatccattacaagtccgccgtcaacgacgaggttttgcccggttaccgccctggcccatggcgatgcaaaaaacaacacggcatccgcaacgtcttccggttctgtcaccctttgcagcggagtagtttcctgaatcaattgaaaaaccgcttcagatgtggccgcacttgcatccgtcgttttcagaaggccgccggataccatattaacggtaatgccatattgccccagatctttcgccatgctccgggtgaagccgaggagcgcagccttgctcgtattgtaatcatggtaggcgacaaccggattttgaaacaggtttgtgccaatattgatcaccctgccgaaatgcagccgtttcattcccgcaaggccggcctggatggtatttaatgcgccgcgaaccgcaccttccatctgcaggctgtattcctcccacgaaatccgggaagcatcgtgccgggattccggatcaaagcggaaatgcacaagggcattatttacaatcgtcgtgacaggcctggaaaaataagcttcggcctgccggaacatctttcttacctgcgccggatcccttacatccgccttcagggcaaccgctttttcgcctaaaatatgctgaagatcctttgccttcccctcactctcaaaatagttgatgacaacgcccgccccttctcttgcaaaagcttttacaactgccttgcctaaccccctgcttccgcctgtgatgacgaccacctgctcatccagtttcatttgtcccatcccttcccatgcaaaaaagccaggcccgaaaagacctgacttcatcagcaagaaatttttttacaaattcctactttcctacgccggtatgatccggatcaggtccaaagggttgaaaaacgccggtttttctctcagcccgccaaatccgggcacccctagtagtttgaaagattattttttagctattatatccctttccaacaaagatgtaaagtttacaatctttttaacagttctgaagagtaaatttttttactcctcagagctgtctttttaaaaaaacataactgactttatcataatccattttttcttcataaaaccggtgtgcgtcttttctctgcaggccggatgacagggatacaatgccgtatccgttttcgccggcctgtttttccacatgcgccaaaagcctggcgccgtacccttttgatctgtgcgcttcatccgtcaccaggtcgcatacccaaataaaccgcccgttgtacaaggtaatcatcggcatatagccggttaccgccacaatgtttccgtcatctattactgcggccatcttgtaatccgatttttctgccgcctcttccaccagctggagatagtgttcttcgtccaaatgtttacgcagctgtttcatcaccggaaacgctgctttccactcttcccggtttgcaagttcttttatttccatctgtatatccccttctttgcctaaatggtaatgcataataatcaattcgcctttttttccaaacatcctgcccccttcatccacaaacccggcttgtctgtacaaattttgggcagcaacattttccgtattcaccccaagaaccatctgctctatttccagaaaatgggtacggacaaaatggggcagctgttttaaacattgcctggcgtatttttttccctgctggtggaaatcggttgaaaacgtccgcagcaatatggcatgcggatgatttgtatatggcctggcgccattttttcatggagcacaaaaaagtttgtgatcctgccatgccggattgcaacaacagggtgccgttccggatcatcttttgcaagggcaatggcttcatccggatggccggtgaaacggagctgatcatccgttattgtatagttgtccaattgctgcttgaaatcattatggtaaaagaccagttccaattccattaccccttgcatgtcgtttctaccaaatcgagggataaccgtaccatatcccggcagcgaatcccgttttcatatatcgtttcagcataatgcctgacgaaaaagcctctgtccaccccggagatccggaaaccgcatttttgatacaaggccagctggctgatgctggaattgccggtgcctacttcgatcgttttaaatcctctttttcctgccctccggatggcatccagcacaagccgttttccaaaacctttcccttgatgtttttttgcaaccgccacattcgccaattccacgattcccggcctcgccggtagcaggatgtaaacgccgatcaccttttcttcaatttccgccacatagcattctccgcggttggcataagccatcaccatttcgcgtgacgggtcggcaaggagcagtaaatccatcggaagtgtttccttgccgcccagccgccggatgtttaacgcattttttgcttccaaaactgccagctccccatccatattttgttaaattctaacatatctttctttatcagtctatcatcctaggaacatttcatcaattctgccttttatgcagggatgcaaacgaaagttctcctttttatgataaaataatggcagacagtacttttcgggaatatagggaggcggagatttagaaacgctgttttttaaaacttttgtttggctttgttttgccggtctcgtgatctatacttacctgtatggaaaaaatgaaaaaaagatggatgcaaaagtttttctgatccggaaaatctggtatttggtttatttattcggtgcgctggtttactggacgatccatccggcgagcattttcatgaattttaaaaactatgccatcaccgcgcttatttttgcagcaatcgacggttttatttttttaaatatgtatttccgcaaaaccggaaaatatgaattggaaagatttacgaaaaccgtttctgcaaatgagtctctgatccaggacaatctgttaatggctaaaaatatgctcgacatcttgaatgatgagggcatcgtagggtattatggtagtaaagaaggatatctgttaggtttaaaagaagtgctggcatcttatgcggaaaaagcggatatgagcgttaacattttgccgtttaccaccccgccagaaaaagatcaggcattgtatagtttcgcaaatcccggttccgcccgcgcgaaattggacaggctggagacggtgtatcatattgatgaaaactatgcgctccatccgatttatctgtttcatgatgcattgtatctattaaaaatacccggttccagagccattacagaaatggattgtatcctgtttgtcatcatggcccatgtttatgattttgcggctccgtcggacgacatggattgaaaaacaaggcggtgacaaaaatgaaaaaaaacagcgcgctcctggcacagagaaatgaaaccggaaatatccggagaactttcagaagaaaatcaagagtccgtgttccttcggttggcacaagcccgacgactttaaaaatcatgaaagaaaacgaacagatcctgaaaaagtacggcaaaaaatcttcagggcaataacaaaccggttattgcccttcatattttttcgcagctttgcatacactattgcagataatcagctgaggtgatcatgggaaaaagttccataaagaaacaagcgtttactctccgcccccttccgcttccccaatggaaaaaaacagaaaaaaacagacagcggaactcctcagctttatggataagctgaaaaataagcgggcaacatgaaacatccgcagccagtaaaaatacagtcagccccataagctttttttaacatccagcagccccctcagctcagcacttttttatgaaaactcggctataacaacttcccatcccgcccaaaacaacagcaggacgctatctgctgtcgcgtttttcagcatgcttaatgcgttttgatcaggatggcacccatcacaatacagaatgctgaaaggtacatccaccaggttggcagtatagggaaacccgataatacatcgaatatttcaatcagcacaaataccttttgggttttcggggaaaattcccggtaggctttccattcttttctgaactacaaaatgccaaacggaagaagaatcaccccagccagtttcaaaaaatcatcccctgtctgcaagcgttacttcctatactgaatattgcgggcacacttcttgtgcattgaatattgtgaaatcatctgcagtaacattattctcccgagccccacttggcaaaacagaaagccgggcattgataatcatatttttgcaaattgatcttccttttcctacccaaatagcctaaattattttgcacaaatcgctcccgcgttcccatttcttatgtttataacattggaatgttgcatattattaaataatataaaggatttcctgcctttctggaagaatagattacgatgaagatatgttatgggagctggtcaaatgagcaaaggaataaaaagcttgttaaaatcattcatatttgccattctgcttgttgcggtcatcaggggatttttcattgccccttatatggttgaaggggaatcaatggagccgacacttcataaccacgataaaattctcgtttataaagtccattctgctgccgattaccaaagaggcgatatcatcatcatcaagggagaaacggaaaactatgtaaagcggattatcggccttcccggagataccattctagtcaaaaatgaccatctctacattaatgggaagttgcacaaagagccttaccttgcaaaaaacctgaaagcagcacgtaaaaaaggcagcaagctgacgaataattttgggcctctcaccgtgccaaaaaataaatatttcgtaatgggcgataaccggttgtacagcgaagacagtagaaacgggctcggccttattccgaagaaagaactcgtgggaaaaaccgaagcggtattttacccgctctcgcaaatccgggaagtccgttaactattcttgcgggcagagccggtatctattaataaaaagcagaggggaatttccttgaaacacgctttagtggcaggcagaaccggcatgctttccgctttacatcaatgaatttcaaatttcttcccctaatgcttttaaaatattgctccaatcaacaagaaaataatgcttgctaataagaaagctgaaggaacacctattaagcctctatttagatataacttaaatccatcctactttgtattaaacgataatctggggatataatacgaaatcaagataatcactgataccacaataaagatagctgtaatactgtccatcgttttcatcacctcttcataagattatcgtgcccattaatttccgttttttctatcctgaaaaattgcaccggctgattttcattcttcctctggtgccgcgttcactgcggcatgggtgtctaaatccaaatagtttgccactctttatatttgcactcagaggagcaaatatggctcctaatatggtttctgctacagtccaggcaatgacaggacttaacgttacaggtggtgccggtgccggtgccggtgccttgataccttgtttcattgccggtaaaaatctatagggattgagacattttgcccatggtttcttcagcttcttttatgacatggtcaatcaatgcttttgccgtttgatgttttgcgagccgcggactttggccggaccaaagtgacataaactcacggttgttctgctttccggcagcctttctgatatcctgtgtgagcgcattttgcacgggataatccggaaaaagcgcttcatgcggcttcatttccgagataaacgcattttttacgcctcttgcccattttccggaaaatgaccgggtgaggacaagctcatcttctttcgcatggagaacggcttccttatgggcctgatgtgcgccgctttccttacaggccaggaaggcggttcccatttgcacgccttttgcccccaagcaaagcgctgctgcaagccccctgccatccattatgccgcctgccgcaatgacgggaatccggacattgtcggcaacctggggaaccagtgacatcaggccaatcatgctttcctcatggtctttcaaaaagtttccccggtggccccccgcttcactgccttgcgcaaccaccatatccatcccggcctgctccgcttcaaccgcttcatcgacggttgttgccgttccaattaggaggatcccgttttgtttcagcctttcgatcacttccccggaaggtattccaaaagtaaatgaacaaacaggcactttctcttcgacagccacttgcacctgtgccaaaaattgattttgcacgcgatgaagatcaggaacttctatttctgcttttgcctccacctttaactgtttgcggatccgatttaaaatgtcatttgcggctgttattttttcatttgccgcttcaaacccgccgggaacaaaaaaattgatgccaaaaaggtttccggttaactgtttgatttcccggatttgttcttttgtttgggcagcggtcaagtaccccgccccgatcatgcccagcccgccggcgtttgacaccgcagccaccaactctggtgttgtgatgccccctgccatcggagcctgaatcatcgggtaccgtgttttcagccgtttggccaaatcgtttttcaacatccaaattcctcccctttgcctttcccccattgtaacaggtttccatattgttttaaacgttttcaaaataatgaaaacattatttggaggaggcaaccgttccttggtgaaaaaccattttccagctcctgtccgtatatttccaaacggaactgcgcaaggtttgctgctttcttgttcggtcgtccaccctttaggttgcaaggaccacgccatcagccaatggatgcatttcaaaatctgtaagcgccatctccctcaccccaatgccgcccggtccggtatatttccgtttatgccagatgtttcccgatgagccgaattcaaaaaagattccgccagcaatgcgcccaattttgccggatccgagcgtgtcgaaggttcaagcagcgatttttccaattggaggatatgttctttaagtgacaagattttgcatcctgtcttctttaagatttgtttactatgctacataaagcgaacgaaattttgccattctgttgcctgtccaaatgaatgatgtgatttttattagttttaaagcagagcttttcaaaatatgggcagaaaaaacctttctatatcaatatgttgtatttgtgttgtttttctgttataattctataagtgtaaagcccgagtcccgcaaaaaattcctgcgcacgacggataacatgaaactgcccgctgcaatatttttactactaactgcgtcttcaacttctaacaaactttccgaacgaagcatatgttttaaaaaagaacaatgggtaaacaaagaagaggtgataacatatgagaaacagaattttcaacttcattattgacggacgattgattacggtaaaaggaaagtccgttaaagaagcaaagcgccatgcacaacaaattgcgcaaagcatgaaaacggaagaaaacatgggcaaccagtcagccatctgattggctgccttttccatttttccgggtaaacaggcatctcagcggtaaagaaatatttagttttttataatattattatgtaaactagttcccgttttttggagcgtggctgtcccgttcttttgaaaaatggcgtgtattccacacgccattttttagtgccggtttgtcggcagcttttcactcgggcttccgttcccctgccgttttttattttgttcctgcttcttttgctgttcattcagcttctgcacatattcattcgtgttgtccatgtttatacctccttccgtccttgttactttaaccaagacccgggcaagcatgcacgcattttggatttccagacgggaaattcgctttcatgattgcgcaattttacagtgatattgccaatttctcatttcaccattttgcacttttttacttgatcttccattctaaaaattcgagccagtttccgaatggatcagttgcgtaaatacgcgctgctcctgggagcttgccgtcttctgcccacttaacttgatagcgggcaaacctgtctttcaagctttcgagatttccgacttcaaatgcaggatgcgcttttttggcgggtaaaaaaggttcttcaatgccgatatggatttgtatttttccgttttgaaaccagcagccaccgcgttttttcaattctgccggtttttcaacttccgtaaatccgaggatttccgcgtaaaactttttggctgtctgttcaacgtggagcagcaagctgaacatggtcaattgcgataaaatgaaatgccaccctcatccctcctccccttaatcttacattccttcttttatcatttaaataatggcttttcatcttaattgatatgttttacttatgagttagcacgccccggcatgcttttttcatgagcctgccagaaaaaaagcacacgggggggtaacccgccgtgcgctttgtaaaaaatgatttattttgcagcgactgtcactttaccggtgtcttcttttttgttccggatggtggcctgtgcagcggcgagccttgcgagcggtacgcggtaaggcgagcagctgacgtagttcaggcccgttttgtagcagaattcgatcgagcttttttcaccgccgtgttcgccgcaaatgccggttttcaagcccggttttgtctggcggccgagtttgacgccggtttcgacaagtttgccgacgccttcctggtcaaggacggcaaacggattttccggcagcactttttgctcgatatactgctgcaaaaattttccttccgcatcgtcgcggctgaagccgaatgtcgtttgcgttaagtcattcgtaccaaacgagaagaaatcggcttcttctgcaatttggtctgcggtaagggcggcgcgcggtatttcgatcatcgtgccgactgtataatcgaatttcaagcccttttcctccatgacctgattcgccatatccgtcacgagcgcgcgcatccgtttcagctcattcacatggccgacaagcggaatcataatttccggctggacttttattcccttttgcaggacggcagcggcagcgtaaaaaattgctttgacctgcatttcgtagatttcagggaaaatcatgccgagccggcagccacggtggccgagcatcggattgaattcagcaagatgctggacttttttcagcaagtattctttttcttccagttcttttgagcctggtgccgtaagctgcagttttgttacttctactagcagttcttccttatccggcaaaaattcgtgcattggcggatcgagcaggcggatcgtcaccggatggccggccatttcctcaaagatgccttcaaaatcgccctgctgcatcggaagcagtttatccaaagctttttcgcgctcttccaaagtctcggcgaggatcatttcctgaacgatcggcacgcgcttaatgtccataaacatatgctccgtccggcaaaggccgatgccgtctgcaccgaattcgagcgattttttcgcgtccgccgggttgtcggcattggcgcgcacgccgagatcgcgcacctcatccgcccattcaagcagcgttttgaattcgccggaaagctcagggtcgatcatcgggacttcgccgagcatcacttcacctgtcgaaccgtcgatcgtgatgacatccccgtaacggacaaccgtatcgccgaccgtaaattgttccgctttcaaatcaattttcaaagattcgcagccgcagatgcatgctttccccatcccgcgcgcgacaaccgccgcatggctcgtcatcccgccgcggcttgtcacaaccgcctgggatgcaataatgccgtgaatatcatccggtgtcgtttcggggcggactaaaatcacttttttcccttccttgccgagccgttccgcttcatcagcatcaaacacaacggcgccggtagcagctcccggggatgccggcagcccttttgcaagatggttttttgccgcggaatcatcaatacggcggtgtaagagctggttcaactggtccggatcgactcttaaaagcgctgtctttttatcgagaatgccttccttcaccatttcaacggcgatgcggattgcagcctgcgccgtccgtttgccgttccgggtttgcagcaggtacagtttgccgcgttccaccgtaaattcaatatcctgcatatctttgtaatgttcttccaataatttgcttgttttgacaaactggcgatacacttccggcatgtcttttgccagcacctggatcggctgcggagtgcggatgccggcgacgacatcctcgccttgggcattgattaaatattcgccgtacagcacgcgttcgcctgttgacgggttccgtgtaaaagcgacgccggttccggaatcatcccccatatttccgaataccatgctttggatattgacggcggtcccgagatggtccggaattttattcaggcggcggtatacaatggcacgctggttattccacgaatcgaaaacggcatttacggcaaggtacagttgcgttttcgggtcttgcggaaaatcctgtttcgtatgttttttaacgatctttttatagccttctatgatgtctttccagtcttccgcagtcatttccggatcagctgtataccctttttgttcccgggtttgttcaagcaaatgttcgaaatggtatacatcaatgccgagcaccacgtcagaaaacatttggataaaccggcggtacgaatcgtaggcaaagcgcggattgccggtcagttccgcaacagcttccacggtctcgtcgttcatgccaaggttcagtaccgtatccatcatccccggcatcgaaaacacagagccagagcggacggagacgagcagcgggttctccttgccacccagttttttgccggttttttcttccagtttcaaaagcgcttcttccatttgcgtttcgactgcacccgaaatttttttgccgtttgcataatagtcattacatgcctcggttgtaatcgtgaagccgaacggcaccggcaggccgatatttgtcatttccgccagattggctcctttgccgccaagcaggtcgcgcatatggctgttcccttcgttgaacaagtagacaaattttgtcatttgagcagctcctccctgtttttgaacatttcaataataaggcttgctgtttcctccaccgctttattcgaaacatcaatgaccgggcatctgagtctccgcatgatgttctccgcgtaaacgagttcttcataaatccgttcaaagctcgcataattggcgtccgattttaaacccattgccctgatccgttctttccggatttcattcagtttctcgggcgaaatcatcagcccgatgcacttttcccgcgggatggaaaacaattcatcaggcggcgcgatttccggcacgatcgggacattcgccactttaaagctgtggtgcgccaaatacatggacaacggcgttttcgacgtccgggagacgccgagcaggacaatgtccgcttttttcagcccggttggatcgcgcccgtcatcatatttcacggcaaattcaatggcttcgatttttttaaagtattcctgatccagcttgcgcattaatttcgggcgatggtacggctccttgtgaaactttttcataaaagcttccatcaacggattcatcaggtcgaccgcaataaccccttcttcgccggcgcggcggtcaatgtattctttcaaaggggtaacgacaatcgtgtaagcaatgatgacattttgtttttttgccgcctcaattaccggttcgatatcgtctgtttcttccacatgcgggtgccgcctgatttcaatgtggccgccgttaaactgcgcagcaaccgcttttacaacaaattcagccgtttctccgaccgagtccgagatgatatgcactatttctttttgttccatgtatcgttcccatccttttcgaaccggaaaatggctccgtatgtatatggtttcttttcactgcccctcccgtatgccaccagtatatgcactgtttggcaaatgtgttatacttgttgttcattagtataacacattcaaaaggatgcgtgaaccattttaccggtttttttaaaaatttttattatcattcaaacgggcagctgctgtgcgccgtttaaaaatctttatgctgcctggctttccccggcgcgggttttttcccagatcatcaccgtcccgagcacgccaaaaagcgaaaagaacgccgggattaaaaagccgtaatggtaaccggccgcatcagcagcattgaaatggtccagcactttcccaaacaagctcggcaaaagcaccgcgcttaaaaagccgccggtattggcaaatccggaaaccgatccgacttccctcacgtcaaaggagtggcggacgaccgcaaacgtcagcgcgcttgcaccattgccatatccgatgacaaacattaaaagcaccgcgacaaataacggcggtttgcccccgcataaaaagaaaaccgtccatgcgagaaaaatcagggtttgaatcagcaaatacggcttcttccttgaaccgagcctgcttgcgatccatccggtaaccggcgcgccgataatggccccgattaatcctgtcatgaccagctggctcgcttccgggcggtccatgccgaaaatatgcatcccgtacggcactgcccatgtgccgataaaaccaacatatgtgccgacaaggccgaaatggcataaaaaggcagcccacgcctgcctgcttttcaggatgcgttttagtaccaacagcattttttcatggcggactttcgcatgcgcatgtgctcccccttcccgtttttgcggcagccggataagcacggcatacagcatcacagtacttgcaagcagcaggatgccggttacaaaaaacggcaggcgccatcctgaagctgatatccatgctgtcagcggaacggttgcgagcaaagaacccacgcttccggccatgccggcataaccgatcagcccgacaaactctttcgcataaaaccactggcttaagatcaggacaagattaatccaaatggccgcatcccccatgccggcgagcacccgggatatgagcaggcacgcttcattcggcgagatgctgtataagaacgtgccgatgccgctaaataaagtgcctgtaaccagaaaaatattcggcccgaaccggtcggaaaacatcccaatcggaatttgcagccccgcataagcgagaaactgcacacctgtcaacaaaccgatgacggacgctgtcaaatgaaactcgctcatcagtttatccggaatcaagcccggtgccgttcgctggctgacaatcaccatataggaaaacagcaccgcgaaaaaaacaatccatctgtacttgcttttttgtctgtccaatctgctctacccctgttttatttgtaatttattactattataatctatttttgcgcaaaaacattttcaattttcaaatccgcataaaaaaactcccggcgcgggagtttttttatgcatttgccggctgccatttggcacggaccaggatccatttgccgtcttcaaaataccatgttgccttgacatcgcccagtttatctgcatgataggcgccgcttatttgctggtaaccttcgagcccgcatccttttttgccttttattttcaccggtttgtaaaccgccaccggatcgatcatcagttcaaacggttcattgagcattccatccttttgataaatgccgagccggatataatcttttttccgttttcttaaatcaatcaggaatgtttcgttcgtattttcaatgttaagccttgccgacagggcattttcaaatttgccgctaagctttaacacgggcggcatcggcaaatattttaaaatgccgcctttcagcgtatcgaggcggtactggtttatgcccccgcttccgccgctgttgcttgatccgagcatgtcctttacaccgtcatggttgaggtctttgaaccggatttccggttcatacccgggctcatacggcagtttatatttctttccttccgacgcggcaatccgcgcccaaatctttttcatatacgggctgccagcagcaaacgggatgccttccagtataatcgcatccttttttccgtccccggttacatccgcctcataccggtgaatcaccattttgccggctttcgtcttcccgcccgcgtccgcgatcacaaccgtgccggctgccataaaccataatgcgagcagtgcaagcatgtattcttttttcatcttctcaccccgcatccgttttcctttaggatacgccgcaagaatagaattatgtaaaacttgcctgaagatgaaaaaagtgtttgccgaaaacggcaaacacttttttcaatcgttttcttccgcggcagcctcttccggttcctgcttccatacttctgccactgtcccgttttcttcttcatcaatggcaaatgagccatttgaataacggtcatggtcgcgcaagtcatggagtggaatgtcttcctgatgccctttttccgttacgaccgagacggtttccccattgcctgcaatcacggccccggcgatccggtgcggatgggcttttaattcgcgcagcatgaggacgccgcgtttggcccggcttgttttgtcaaattcggacactttcatcttcttgacggcgcctctttgagtggcaatgaaaactttatctttttccggatcttcaatgattttcccgctaacgagccggtcgccttctttcaggttcatgccttttacccctgctgcccgctggccgacaacgctgatttccgcttcatcaaaccggagcccgtaaccgaggcgggaagcgaggaagacttctttcgagccgtctgtcaggtggacatcgaccacttcatcatcgccctttaagtttattgcgacaagggctttcgaatagcgctgtgcctggtactgctgcaattccgttttcttcgccatgccgtttttcgtaaaaaacaaaataaactgcggctggttgaaatcttcaatcgggagcactttgatgatgctttcatcgcgctcaagcgccacaagattggaaacatgctgcccgagatctttccagcggatatccggcagttcatggaccggcaaatagatatagctccctttatttgtgaaaagcagcaccgtctggacggtattgagctgccgtttaaagagcaggcggtcgctgtctttaatagcaaggtcccggccgtttgaagcggtgtaagaacggatgcttgtccgtttaatataaccatctttcgtaatggtgaccatcacatcttcattcgggatcattgcttccagattgatttttagttcctgtatttccgcttcaatcgttgtccttctgttatcggcgtattttttccggatttctctcagttcttttttgattaccgtgaacagttttttctcgctggataaaatcgcgagataggtctcaatttttttctcaaggtcttccgcttcattctgcagcgtcgtaatatccgtattggtcaggcggtagagctgcagcgtgacgatcgcttcagcctggggctcggtaaaatcaaactttgcgattaagttcgctttggcatcttttttatctttggatgcccgaatcgccgcaatgactttatcgagaatggaaagtgccttcatcaggccgtcgacaatatgcttgcggtcacgtgcttttttgagatcgaatgccgtccttcttgtgaccacttctttctggtgttcaatataagcatcaagcaattcgcggagtcccatcagctgcgggcggcggttatggatggccaccatattgaaattgtaggaaacctggagatcggtgtttttaaataaataattcaggacgctgtctgcatccgcatcttttttcagttcgatcacaatccggagcccggtccggtcagtttcatcacggacttcggaaatgccttccactttccggtcaatccggagctcgtcgatttttttgacaagattggctttattgacttcataaggaatctctgcgatgacaatctgcttccgcccgccgcggatctcttcaatcgatgtcctgcctcttacgaccattttgcctttgccagtttcatatgcttttttaatcccgtcaattccctggacaatgccgcctgttggaaaatcagggccttttatgaccgccatcaggtcgtccaccgtgcaatccgggttttccatccgcatgatggccccgtcaatgatctccccgaggtggtgcggcggaatttcggttgcatatccggccgagatgccggtcgagccgttcaccagcaggttgggaaaccgggcgggcagcacaaccggctcatttgcggtatcatcgaaattcgggataaatttaaccgtttctttatcaatatcatgaaggagttcggatgcaatcggggcgagccttgcttccgtataccgcatggccgcggccgggtcgccgtcaatgctcccgttattgccgtgcatctcgatgagcacatttcgcagcttccagtcctggctcatccgcaccatcgcttcataaacggaagaatccccgtgcggatggtagttgccgatgacgttgccgaccgtttttgccgatttccggaaatgcttgtcagcggtgttcccctctacatgcatcgcatacagaatccgccgctgcaccggcttcaggccgtcccgcgcatccggaagggcacgatcctggataatatatttgctgtaccggccgaagcggtcgcccagcacctcttccaaaggcaaatcttgaaaacgttcagccgtcttcatccgttcatgtccccttcctcaatcatcaaattctcattgtctaaaatattggtatcgtcttcaagcccgaattccacatgattttcaatccattgccggcgcggttcgaccttatcgcccatgagcgtggtcacccgccgttcggcacgggccgcatcatcaatgcggacacggatcaaagtccgcgtttccggattcatcgtcgtttcccaaagctggtcggcattcatttcgccgagccctttgtaacgctgcaggatatagccgcgtccgacttttttgatcgtttcatccaattctttttcggtccacgcatattccacgatttctttcctgccggtgcctttgctgactttataaagcggcggcagcgcgatgtaaacttttcccgcttcgatcaaaggccgcatatagcggtaaaagaacgtgagaagcagcacctggatgtgggcaccgtccgtgtcggcatcggtcatgataatgactttgtcgtaattgacgtcttccaaattgaattcagggccgacaccggcaccgatcgtataaataatggtattgatttcttcatttttaaaaatatccgcaagctttgctttttccgtgttgatgacttttccgcgcagcggcaaaacagcctggaatttccggtcgcgcccctgtttcgcagaaccgcccgccgaatccccttcaaccagatacaattcattccgctgcggattgcggctttgcgccggcgtcagctttccggataaagtcgtttccgatttcttccgttttttgccgcttctggcttcttcccgcgctttcctcgctgcttcccttgcctgcgacgccttgatggctttccggatcaaaagattgctcgtatccggattttcttcaagaaaataagacaggtgctccgaaacaatcgtatcaactgcagagcgggcttcgcttgtgccaagttttcctttcgtctgcccttcaaattggagcagttcttccggaatgcggacggaaataatggcggacagcccttcgcggatatccgtcccttcgaggtttttatctttttcttttaacagtccggtttttcttgcataatcgttcacgacgcgcgtcaaggccgtttttgccccagcctcgtgcgtgccgccgtctttcgtgcgcacgttgttcacgaaggataaaatgttttccgaaaagccgtcgttaaactgaaaggcaaattccgcttcgattccgtttgtttccccttcgataaacacaaccggatggagcacttcttttccttcgttcaagtactggacaaaggcttcaatgccgttttcgtagtggaacagatcatgccgcccgaaacgttcatcggtgatttcaatttttaacccttttaaaagaaaggccgattcgcgcaaccgttcgcataatgtatcgtaattaaaagtgatggtgctgaaaatggacgggtcgggtttaaagtgtatcgttgtgccggtcttattggttttcccggttttctcaagcgttgtttccggtttgccgccgccatggaaacgctgttcatacacataaccgtcgcggtgtatcgtaacaaccagccattccgacagggcattcacgacggacgcgcctacaccgtgcaggccgccgctcgttttatagccgccctgcccgaactttccgccggcgtgcaaaatcgtcaagatcacttccgttgtcggtttgccgagcttgtgcatcccgaccggcatgccacgcccaaaatcctggacgctgatgctgttatctttgtgaatgttgacgatgatatggtttccgtacccggacagcgcctcatccaccgcattgtcgacgatttcatagacaagatggtgcaaaccacgcgcatcggtcgacccgatgtacatgcccggtcttttccttactgcctccagcccttccagcacctggatcgcatcatcgttatattccaatatattttgtttcttcgccacatctattcccctttcaattgcaaagcacgtgcatccgccgttcataggaacaaatattcgttctcattataacatcatttgccgtttttatcatactcattttatcgataaaacggaatttgtaaagggtatgcggaaataacgcaggggcaaagcaacggttatggaacttctccggcaaacggccgcttgattgggcaaatataaagaaagcaagcgccctttaagctggcgcctgcatgaaaaagcctattttgtcagggcatgttccactttaatgcagcggttcatcactaccgtatagcctttttcttttaaaaaccggtacgcttcttcgttttcgatgccaagttgcgcccagaaaacatccgcatcgatttcatcaaactcccgtgccagctccggcaaatattcgggccgcctgaaaatatcgacaatgtccacatggccttcgatatcttttaaagacggaacagccttttccccgagaatttccgttgctttcggattgaccggaataatctcataaccggcatcctgcatggctttggctaccatataagatgttttttccgggttattgctcaatcctaccactgcaatccgttttgctttttgtaaaatttccctgatttcttccctgctcggattttctattgccatttgatcaacccctctcctttcttgtactttcgccagtccggtcccatcttaaacattcgcttgatcttttctaattcctgcctggcgcgaaaatctgcacggaatcgacaaaaaatattcctctttcctttaagaacatgctacaataagcatagattttttccaaggagttttgcacatgactattgccctgatggtccttttggcttacctgctcggctcaatcccgacaggcctgatcgttggtaagcttttttacgggatagacatccgcgagcacggcagcgggaatctcggcgcgaccaatacgttccgtgttctcgggttcaaagccggcagtgtcgtaacagtggtggatattctgaaagggacagtcgccactttattgccccacttttttggcctggagcatacggttcacccgcttttaatcgggctgattgcggtgatcggccatatgcttccggtatttgccaaatttaaaggcggcaaagcggtggccacttctgcaggcgttgtccttgcctaccaatggcccttgtttgttatggtgattatcgtctttttggttactttaaaaataagcaaatatgtttcgctttcttccatcatggcggctttttttggcatcctgtatacgctcatttatatgatcgtgacgcatgactggccgctgtttgtcatcgttctggcgctcgcctctttcattatttaccgccataaagccaatattaagcggattaaaaataagaccgagccgaaagtcaaatggatgtaaggcagccattttttctaaaaccggatatttcctgcaaacacggaaccagtccagaggcaaaaggttagggaaaaagcgtgctttggtctataatgaaaatgcaaaaggcgcagttggaaggaagtggcggcatgaaaattcacattacagatgaggcggtaaactggtttaaaagggaactggaactggatgacggtgaatccgtccgcttttttgccaaatatggcggttccacgcctatccagcacggattttcacttggcgttcaaaaggacattcccgacgatccggcggcggccgttgaacggaacggcaatgcctttttcattgaaagcacggacgaatggtattttgacggccatgatttgtatatcgggtacgacccgggacgggatgaaccggtatacgaatataaaaaaggttaaaaccgggatcatccggcagctgctcttttgctgccagtgatgccggttttttattttaaaaatttttttgcttccgcaaggcgcccttctttttgcaaaatttcccgctgtttttggccaagtaggtcgaaatggctgtaaccgtctttgcggacatgaatccattcttttttcagctggtagcgcgctccccatgcagcgagtttctcaagatctttacagccgacttttgtgaccgattttgcgctggggaaacggtcatccagccaaaaatgcgttaaaaacgcaatttccccgcggtcaatcgccgctttccacgctttgacctggttgcggtgtatgccaaaagccaaaattcatcccccgctttatgatttttttgctttttcatatgcttcatgccattttgggtagaggcggcggaacgcaaccgggcggaaactgtctttttttacgcagacatgtgttgaactcgcggccacggcaaggtcgccggtttctgtgtaaacctcatagccgtactttacgcgcagcccgtcatatgcatcgacccatgttttcacggtcaccgtttccccgtaacgggccggttttttgtatgaaatttgaatatcgatgaccggcgacaaaatcccgtctttttccatatctgcatagcggaagccaaggtcttcgattaatttcgtccgccccacttccatccagacaagataattagcatggtacacaacccccatttggtctgtttccgcatatcgcactttgatttctgcttctgatacaaacatcccagacacctctttcatatgtacattcaacatctttattttagcataaagaaaattccccctcctaaaaggatgcctgatacagggccgggaaaaggttcgcatgcacgcatggccgcagcaaaaagggaaaaaaaacggcctttccgagagggaaaaggcgtggttccaaagaaacgctgctgttttccgtcgaaaggccgttttcgtttattgctgctgtttgtatgcggcttcgtcttttacctcggttctcatcgcttcgaggctttcacggcgccgctcatttttttcctttatttgttggatttgcgtttcatcacttgtaacagcaagcgattcttccgcactttccatgttttcgatcgtattgtggatcatgttttgcagtttttccacattatcgctgcggtcgtccggtttcggccggttatgcgccattgtgttctcctccttcggctgttgaagctactccccttttgtctgtatcacctgtgcatgctgtcccgaacggtcctgcatcttcttccccttattgccggaaaatccgcgcggctgcgtgccaagatgatcgggaacgaaatatttgcttttcttgtttggattgctcatcacatctcccccctcctcatacattttcccccggaggaaagcggattatgatccacaaacagtggcttattctgctaatttcatctcgtgtttccggtccagccgttcttctatccgcatcagcgcatccctgtcgcgcaacagttcctgtttattttcggcaacaagatccgaaaaggtctttttatgggtttttctcatatttgcccactccttacaagtatttttacttagtatgggcaattatgggaaaaattataaatttggttcaaaaaaaagctgcggcagaagccgcagcttttttaaacattatgattttgattgcacttcatttttggactgctgcagtttttcgcgcagcaccatttgcaagatgccgccgtggcggtaatagtcaatttctacgtcggaatcgaaccggacaagcgcttcaaattccgttttcttcccgttttcgtcagttgccgtaacctttacccagtcatgcggtttaacattttcgtcaatatggacatcaaatgtttctttgccggttaagccgagcgtgtcggcattttcgccttttttgaactgcagcggcagcacgcccatgagaacgaggttggaacggtggatccgttcaaagctttccgcaatcacggttttaatgccgagcaggtatgtgccttttgccgcccagtcgcgcgatgagcccatgccgtaatctttgccggcgagaaccacaaggccggtgccgttttctttataacgcatggcagcatcataaatcgacgtcacttcattcgtcggccagtaagtcgtatagccgccttccgtacccggtgcaatctggttgcggatgcggatgttggcaaatgttccgcgcatcatgacttcatggttgccgcggcgggaaccgtaagagttaaagtcacgcggttcgactccttttgacagcaagtattttccggcaggtgtgtctttgccgatcgcacccgcaggcgaaatatggtcggttgtcaccgaatcgccgaatttgccgatgacgcgcatgtctgaaagcggctgtacttcgcccggttcaggcgagagattttcaaagaacggcggattttggatgtaagtcgattccgcatcccatgtatacagcggttcgtcgctcgtttcgatcgcattccaccgttcattgtcggtaaagacgttttcatattgtttgcggaacaattccggcgtgacgactttttggacattttctttgatttcatccgctgacggccaaatatccttcaggtagacgtcttggccatctttgtctttgccgatcgggtcatggtttaaatcgatattcaccgttcctgcgagcgcataagcaaccacaagcggcggcgaagccagatagttggctttaacaagcggatggatccggccttcaaaattccggttcccggaaaggacactcgttacgagcagatcattgtccatgatggttttttcaatttcttccttcaacgggccggagttaccgatacaggtcgtgcagccgtaaccgaccaggttaaagccgagctgttcgaggtacggcattaaaccggcgtcttttaggtagccggtcacgacttttgatcccggcgcgagcgaagttttcacatatttcggcacttccagccctttttcaaccgcttttttcgcaagcaggccggccccgagcataacgtaagggtttgaagtgtttgtgcagcttgtaatcgctgcaatggcgactgcgccggtttttatcacggctgtttcgccgttgttaaaatggataacagcctctttatcgagctctttttcatccagtccgaaaccctggttgccggaaggcgccgtaatcgctttttggaaagcggactgcatttgcgataacggaatcaaatcctgcgggcgtttcgggccggaaaggttggcttcaatttcagaaaggttcagttcaagcacatccgtataaatcgggtcttctttgtccggcgtaaagaacatgccgttttctttcaagtaagtttccacaacttttacatgttcttcgctgcggccagttaagcgcaaataggcaagcgactcatcatcaaccgggaagaaaccgcaagttgccccgtattcaggcgccatatttgcaatggtcgcacggtctgcaagcggcagcgtcgagacgcccgggccaaagaattcgacaaatttgccgaccacgcctttttggcgcaaaagctgggtgacttttaacgcaaggtcggtagcggttgccccgttcggaagcgatccggtcagttttacgccgatgacttccggaatcgggaaatacgaaggctgtccgagcatgccggcttccgcttcaatgccgccgacaccccatccgagcacaccgaggccgttgaccattgtcgtatgggagtcggtcccgacgagggtatccggatacgtttcatattcgccgttttccagttctttttcatggacgacacttgccagatactcaaggtttacctggtggacaatccccgttgcaggcggaacggcacggtaattgtcaaacgctttttgtgcccagtttaaaaatttatagcgttcggcattgcgtttgaattcaaaatccatattcacctgaagggcatccggcgcgccgtatttgtcaacctgaaccgagtggtcgatcacaaggtcaaccggcacttccggattgattttatccgcgtttccgcccaaatcagccatcgctttgcggagggaagcaagatcaacaacaaccgggacaccggtaaaatcttgcaaaataacgcgcgacggtttaaacgggacttctttgtcctttacttcatccgatccccatttcgccaagtcttcaacatgttctttcgtaatcgcgcggccgtccatttggcggagcaccgattcaagcagcactttaatcgaatacggcaggcgcgcaacattggcgactcctgcgtcctctagcgctgtcaggcggtaatagtgatagcgtttcccatttacttcaaaaacggtacgcgctttaaagacatcattggacatgtcttttccccctttgtcaagattcgtattttcgtcatttaaaagattaacagaatgattcgtataaaaaacgcctcacagcttcatcatattacaataaatgacataagtaaataacaataatattattgtctgtgataagttttaattatatcacctgccatttggtttgcaaaaaatttatcggtaaggtatgattttccctttattcaacatactaaaactgtagccagggaggtgagccttgtgacaagacagaaagcaaaccatatccggccgggcatgaatgcggcaaaagcgcaagggaaaggcgccggatacaatgaagaattttcaaacgagcctttaacggaaaaagaaaggcagtttaataaaaaacgtaagaaaaaccagtagcatggcaaagaaatcagcttgacaagctgatttctttgttttgtccattgagaatctttatcaatataatattgatgtttttctgatgtttttctttagatggcccagtccccattgcggaaaaccggaacaacggttccatcctgtttgatgccgtcaatattcatatcagcagagccgatcataaagtcaacgtggacattggagacgttcatgccgtgttttaacagttcttcttcgctcattttcgtgccgccctggatcgttgtcggataggctgcgccaatggccaggtggtttgaggcattctcgtcaaacaatgtattgaaaaatgtaatgccggactgggaaatcggcgacggatccggtacaagcgcaacttccccgagccctgttgcaccttcgttttcaaatacgagttttttgatcgcttcttcgcctttttcagcagaaatatcgacaattttcccgtctttgaaatggacaacaatgccttcgattaaagtgcctgcataacttaaaggttttgtgctgcgcacgacgccttccatcctgtgcgtatccggtgcagtaaacacttcctctgtcggcatattagcaatgaattcttcgcctttcgggttcacgctgcccgcactggcccaaatatggttttttggaaggccgagtgtaaggtccgtccccggcgccgtataatgaagggcatcgaattgaatgccgtttagcttcgccgctttttcatttaacttctgtttatgttgttcccaggcggcaaccgggtcgtccgcgtagacacggcatgttttaaaaatctggtcccaaagcgcatcgacctgtgcttcttcggtttctaaatccgaaaacactgcttttgcccatccggcccccgccgctgcagcaaccgtccatttgatatcgtcattttgcgttgcaacccgctgcgctttgaaagctttcgccgctgtattttgataagcggccactttgtgcggatcgacctcattgagcaggccggggtcgctggaaagaatagacagccggctcactttatggttgagcacatggtcttccgtctcggcaattttgtaatccggaatatgcgtcagcacttcctgcggctggttcaggtaatgctgctttgtaatttcatcatccgaccattcgacgattactttttccgcgcccagtgcatacgcttcttttacgacaaggcgcgcaagttttgcctggtcgactgcaatatatacttttacccagtcgccctgcttcacattgatgccctttgccacgagcaattttgcatatttttgtaaattctgttcaaaatttggcaaagccatttcgattccctcctgttcattgcttttcattatgtataaacccttcctgtcgcaggcctgatacaattctatattataccagatcctggcgcagatgaaaaaagcagggattctccccgctttaatgcaaatctgtatgttttacgattttatccaaatcgcgccggaactgttccaattgcacccgttgcgtttcgctcgctacttcgagcgcattttcgatctcctgatatgtttcgttgatttcttctttcaaatgggcgagctggtgcccggcgtcttcacttcccatgtccaagttctgcaggatgtcttctgtcagggccatgtgctgcccggccgcttgaaacgcctgctgtttgtctttatggtaaggcattgtcatctctccttcaaaagatagtatgttcaatttttttcatgatatgctgtataaccgctttgcaaaaagcaaattgtatagttggagggatgaaaatggtgaataaaaacgacggaaatgatatccgcagaaaccagccaaaaacaaacaacagcgggcagccggaaccgttaagcggctcaaaaaaggttaaaaaccggaaccattcaagacaaaagcacaatcccgggcatgatatgtaaactttaaaccaaaggattgccggctttcccctgaaaagttccgcatatttgtctttttagatgttttagaatattactgcccatgtttagcccggtacaaagaaggcaataagtacaacgagttcgataaaacaagatatgaaacttaagttaacaggaggaatgtgaaaatgtcgtttattctatatttgatcgtaggcgggattattggatggcttgcaggattgatcatgggacgggacatcccgggcggtatcatcgggaacattattgccgggattgtcggtgcatggcttggcggcgcgattttcggaaactgggggccgcatatcgcagggatggcgatcataccggctttaatcggggcgatcattctcgtctttgtattaagctttattttaagaatggcaagaaaagcataacagtaaaaaagggcggccggaaccgcccttttttatttgcttgctttttctaaaccttctttttgataaaggcgtacatagtacatcacttcggacacgtatttgcggctgtgattatacgcaaaaaccgctttttgaatctgcccgtttgctgccccgtttttcgacaaataatttgccgcgctgaaaatcgcgtctttatcgttaaacgggtctgctttcccgtccccgtccgcatcgacgccgtatcctccgtatttttttatgacagctgggtccgtttcttccctttccgggatgtctccttttccaaggccgctgcatgacgggtgcttccagccgacaaatgtgcacggcataaattgcatcgggccttgggccccggtcggcgagaccatcggcttcatcgttgaaaacctggtttccacccggtgatgggcagcaagcacataccagggaaccccgtatattttctccgcttccagatagatggacaagtatttttcagggatttggggattcgcttttttctggatgttctcttcgaaaataaaataggcgcttaacacgatggccggaataagcaggatgatccacgctttaccccggttccgcttctttttcttccatgttttgggcatttccacttgaatcctttcatcaatccgttaaaacctctcccctttatattatcgaatgtaaaagccgaaatccataggaagattccggctttttcccgcatacattactgcacgcctgcataatggccctcaagctgttcgcgcaatgcccgttttaaaaacttgccgacggacgttttcgggatttctttcataaacaaaatgtcgtctgggacccaccatgaggcaaattgtgttttcaaatcatctttcagttccgcggccgtgattttattttcatatccgctttttaaaaccacacagccgagcgggcgttcctgccatttcggatgggggacggcaatgacggctgcttcaaagaccgcttcatgcgacatgagagcgttttcaatttccacagaagaaatccattcaccgccgcttttgatcagatcttttgtccggtcggtaatcttcaggtacccatcctggtccacgaccgcaatatccccagtatacagccagccgtccctaaatgcttcctgcgtgcgctcgtcacagtaatattcatccgcgatccacggccctcttacggtcagttcccccattgtttttccgtcccatggcacttccccgttctcattgacgacttttacctcaacaccgggaacaggcagcccggtttttcctctcacatccacaatttcgtccacggtaaaatggtccatgctgctttttaacgtggccagcgaaacaatcggggtcgtttccgtcatcccgtagccggtcataaacggcactttgtacgtttcctcgtaagcacggatcaatcctttcggcgatgccgcacccccgcttacgatcaggcggaggctgctgatatcatacggcttttcctgcagcactttcagcatgccgatccaaatcgtcgggacgcctgctgtcatcgtgactttttctttttcaatgagttgtgcgagaatttccggtgtaaaagaaggccccggcagcacctgggttgccccgaaccaggtggctgcatagggaagcccccaggcattgacatgaaacatcgggacgaccgtcatggcgacgtcgcgttcctggacactgagctggtcggcaagcccgagtgccatgctgtgcaaataaaggccgcggtgggaatagacaacccctttcggatagccggtcgttgccgacgtgtagcacatcgcggctggcgcatgttcatcaaggtcatgtaaaaacggataacgcccgtcgccttcttccaggatggcttcataattggagacaggaaacaaggttgtttctggaatcgttttttcgtcgctcataatgataaaatgctcgaccgttttcaggcggccccggattttttcaatcaccgggaagagatcttcatcgataagcaaaattttatcttccgcatggttaataacgtgggcgagatggtcttccgacaggcggatgttaaccatatggaggacagccccgcggcacggcacggcaaaataggcctctaaatggcggtggtggttccatgcaaacgtaccgatccggtctccttttttcatgccgagtttttccagcgcacttgcaagacggcgtgtccgttttgcaatttcacgatacggaatccgctgaatcccggtgtgcgtccgcgagatgacatatttctcgggaaaatagcgttcagccctctcaatcatcgaagaaagtagaagtggcgtcttcatcatcagtatctacccctttatctgtaatatatgtttatcccggtttagaaaaaccatggcaggataaaagaagttaaaatggcggccattcccatcgccacacctgatacggcaccctgcagctccccttcctttacggcttcccccgttccgatcccatgggaaatcgtgccgagcgcaaggcctcgcgataccgggtcatggacgcgcgccaaagataagagcttcaggccgaacatggcgccgatcatcccggtaatcatgacaaacccggcgaccagcacctcattgccaccgatgatttttgccacctcgcttgcaaccggcacggtgacggatttcacggcaagggaagcaaaaatattgtgcgacagctggaaaattttggccagggcgagggcggtcccgacagtcagcatgctgcctgaaagaatgccgccgacaaccggcagaaaatagcgcgcaagaatcgccctgtttttataaagcggcacagccagcgcaacggtggccgggccgagaaaataggtcatgaccccttttgcgggaagatacgctttataggatatatggcttgcggtcaatagcatgatcaataccaccgtactgaaaaatacaggcgttgtgaacggggaaggaaaccttctcgataaccgcaacgacagcaggtaaacgaaaacggtgatgaaaatgctataaagtgtcacggcgtaactgctgctcatggcttgcctcacgcccccttgccaaaagctgggcggacatccccgtccctacaatgccggctaccgcgctgacagccagtattacggtcagcaccacgccattatggaggaaaaatgaaccgagcgacatcagcccgacggaaatcggaataaaaaagaaggataaatgttttaaaatccatgttgcgcccgtatcgatccactgcagcttcaaaatgcccgtgaataataaaagaaacagcaccagcatgccaaatacattccctggtaccggcaaatgcaggattttgactgcttccagcccgatttcgtaaatgacccagagcaaaccgatctgcagtgcaccaattactgcttttttcacgttgcatactccctttttatttgctgtattattacagttcttattatacaaatattccatacagattttaaatatcctgtatgattttttcaaaaaaaaatcatttttcattttttctccccggagcataaaggcagctggccatccgcatcctataaggggagggaatccgcatgccaaaacgaaaaagaaaaccgcttatcgcagaatcaaggagcgcgcttgaccggttcaaaaccgaagtgatggccaaagaaggatatcgtaccgatacggaccacccggacgatatcaaatacgaggtggccagtgaacgcggcattccgcttcaaaaaggctataacggcaaactgacggctgaacaggccggaaaaatcggcgggccgatcggcggaaacatggtgaaagaactggtccggatggcgcaggaacaattaaagaaaaaataaaacgggcagagaatttccctgcccgtttgttatagtacagactccgcttcacattgctggatttatccggctgcttccgttccgcctgaatgctgcatttggtacatttgataatacttcccttttctttccattaacgcttcatggcttccgcgttccacaatccggccacggtccagcaccaaaatctggtcggcatttttgatggtggaaagccggtgggcaatgataaacgtggtccttccttttttcaggacatccatggcatgctggatggccaattccgtttccgtatcaatattggacgtcgcctcatcaagaattaagatagccgggtcaaaagcaagtgcgcgggcaaacgagatgagctggcgctgcccgctcgataaagtgctccccttttcaaagaccggttcatcgagcccttcttccagatttccgatcacttgatcggcgccgaccgcttttaacacggcagccgctttttctcttgtaatccgcgggtccccgaggctgacatttgaataaatcgtgccggtaaacaaatacgggtcctgcagcacgatcgccatatgttcacggacggcctgccgcggaagcgaccggatatccgtcccgtcaatccggatttctccttcattacaatcgtaaaaacggaacagcacattcataatggaacttttcccggatccggtatggccgacaagcgcgaccgtttcacccggctttgcctcaaagtcaatgtctttcagcacatattcgttttctttgtagccgaaaaagacgtgccggaactccacatgccctttaaagcgcggtacggatttcgcctccgcatcctcgcctttttcgtccagcagcctgaaaacacgttcgccggcaacaagcgcctgctcaagattgctgaactggttgacaatattgctgatcgggttaaacagccggttaatatagtccacataggcatacaaaaggccgacggagagcccggctgacaaaccggaaagggcgctgtgcccgaaataccagagaaacgccacaagcacgagattttttaaaatgccggttaaattatgggacgacaaggcgtttaacaccagcattttgttctggtatttaaaatgcgtccgattcagctgttcaaaggtttccttcgtttgcttttcgcgccggaaagcctggatgaccggcatgccctggatcgactcattgatcatggcattcatttcgctcactttcgaacggatcatccggttgtactgctgggcaaacttccggtatacccgcatccacagccataaaatgggcattaacaacaggcagacaagcgcaagtttccagtcgagcaaaaacattgcaatataaatgccggcaatataaaccaggccgctgaaaaagtttgacagcacagccacatacaattcgtggatggcttccgtatcattggtgatgcgcgagacaatctttccggccggcaggttgtcaaaaaatgggatcggcaatttttgcaagtggataaaaaggtcattccgcattttctggataatccggtttgcagctttttgcaaataaaaatattgcgtaaactggccgaatcccgacacaacataaaggccgaaatacaagattaacagtttcaaaatatacgggatttccgggctgtaaaagcggagcacgcccgcataggatatcttttccgcccggtaagaagccgttttgccattataggtcatatatagttttccgtcccggtacgtatttttcccgccggtttcaacacggccttttacgaaataaaagtttcttcctgcctggacaatcgtccgcttcttcccttttttctcctcagcggaagcataaacaagccgtttgtaatggcggccgtgataagaaaccgcctggcggccatcatgggtctccacccatacgctttcaatgccggtgatatggcggtcaatcatcgtttttgccacgatcgggctgaacacatccgccccaacggcaaccataagggccgcgagcgcaatcaaaatggaacgtttaaagttcatcgcatagcggaaaagccgttttgcagccattatgcttccacctcctcacgggacttgagctgttggcgcatgtactgttcgtaataccagcccttgtttttcaacagctgttcgtgcgtcccttcctccgtgataaggccgttatcgaggacgacaatccactgggcgtgttcaatcgccgacagccggtgggtcgcgatgatggtcgttttatttttccgctctttccggatgttcgcaataatggacgcctcggtcttggcatcgacagcggacagcgcgtcatccaggatcagaatttccggatcttttatgacggcccgtgcaatcgagatccgctgtttctgcccgcctgataaagccacccctttttcgccgacaagcgtttcaaggccgtccgggagcatttcaatatctttttcaagcgatgcggtccggattgctttctgcagttccgcttccccagccgaatcggtaccgaacagaatgttttctttcaccgttctggagaaaagcacatggtcctgcggcacatacccgatccagcctaacacttcttctttgctcagttgttcaatcgggacgccggacacaagcagccggccgcttccaagcgggtattcgcgcaacagctgtttgatcaacgttgtttttccgctgccggttttgccggtgattccgaccgtctccccttttttgatctttaaatgaatatgcttcaggttctcttcccgcgacttcggatagtggaaagtataatcggcaaattctatgatatccggctgttcaaccgttttcgggttttccgggtcttttacatcttccgcataccgcaatgtttcatttacacgatccagcgaagcattgccgcgctgcatgacattcattaattccccgatcgcaaacatcggccatgtcagcatgcccaaatagacattaaaggaaacaagatttccaagtgtaatttgctggtgaaaaacgagataagtgccgtaagcaaggccgatcgtgtaactcatcccggtaatgatctttgtcagcgggttaaaaagcgcgtcaattttttcgaccgcaatgtttttttgataaacgtcctccgtcatcgcccggaatcttgatacgtccgctttttcctggttataagcacggatgacacggacgccggcaaccgactccagcacccggttatttaaatccccgaaggcgtcctgggcgactgtaaagcgtttatggattttctctcccagcactttaatgccggctgccagaaacggaagcggcaagatcgaaacgagcgttaacttccatgagatcagcacggccatggtcagaataatggtcagcatatacattgttgaatcaacaagcgtcagaatcccgaaacccgctgtctgggatactgcccgcaaatcattcgtcgcccgcgccataagatcgcccgtacggttccgttcaaaaaaagggggcgccatttttaaaaaatggttcattaaccgggaccgcagcattttttccacgataaacgccccgccgaacaagttatactgccatatataggtcaggccgtaaagggcagctgcaatcgccagcataacgccgatatagagggaaaaaatgtgcgctgtcatctccccggtgaatattttatcaatggaatcgccgagaatcatcggcgggagcacttccagcaagttgacaaccgaaagtgcaagcactgcaatcgcatatcttttccaatatgctttaaaaaaccagcctaatttccccagtacactaaacaaaccgtcgtcctcctcccgtcatttctgttctctaaccgccttttttctatccgtaagacaatagcaaaaccggattattcttcatcctcttcatcccctttttcaaaatgtccatagcctggaaaagcacagcccttcaacataaagttcaaaaaaatcaatggtgatggtgatgaccgtgttcgcgttcaatcctcgggtttgtaatcacgaattcttcctgcggcacgtaaaaatactggatccagatgccgtccaaatacggatcgcgcgaatcaagcaaaatatcaatgcccttatccgttttgacaatttcatcctgttctcccggcgtatccagcgtaatatcgtaatgggcatggtcgccgtgcatctgggccacaaagacgcggatcatttttccttccgcatctccttcatccaatattttttttaacatttttgcggcattccgattgattttaacgttcatgttcctacctcaattcttcttgtttttgtttctttattatgacagaaaaaacggaaatcgcaaaccggaatgcttcgtgtgatgtggcgaatatatactcacaggacaaactgctctgtaattaagtttaccaagcaaacagccggtgttttcctgcagtattggctgaatttatacggctttagagggcttgccatgatggcttgtttcagctgcactcccgggcctggccagattcaggccgggataccggatcttcactggcataatatttgcacactcgaaatatttgttgtatgatacttctgtttttgaacgggcatgaaagaaaatgaaaaggatattctgtagaaagaagtcttgcatctgaagcgagggggattgttatggctttatccaaaagaacggtttttttaacggccatcgcttccggtacgatgctgaacccgctgaattcatcgatgatctcgctcgcccttcacagcatccaaaaagatttccatttgagtttttcaactgtgtcgtggctcatttcatccttttatttggcaagcgcggttgcccagcctgtaaccggaaaaatcggcgatatgatcgggcgcaaaaaaatgtttcttgcagggctgttgcttgttgccgtttcggcaatcggcgcgccgcttgcaccggcctttttcgtgctgcttctcatgcggcttttccaatcgatcggttccagtgccatttatccgtccggtgtcgcactgattcgtacccatattcatgaaaaccaggcctcggcgcttgctgtcctttccatttttgcgtcggccatgacggcgctcgggccgactgccggcgggattttaatcgggattggcggctggccgtcgatttttctcgtgaactttccttttatcttgattagttttctgcttggctggtttatcttcccgaaagatccggagaacaggcatgcttctttcaaagatgttgtgcacgagctcgactggaccggcattttcctgtttgctgccgggcttgtgctgcttttgtattttctgctggaactggaatcatctgtccatatttggaccggtgcagcaggcattgtgctacttgtcctatttgtgatctatgaagccagaacgggccgcccgtttatcgatgtccgctttttatacaaacaccggtccctctctgttgtgtatttgcaatttatcgtgctgaatttattcaattactgtttgttcttcgggctgccgagcttctaccaggacgggctccatttcagcgtgcacacgagcgggttcatgatgctctttatgtccggcgcaagcatcctcatttccctcgtttcgggcaaatggatcgaccatgccggaaccgccgggccgatccgtatcggtgctttaaccatgattgccggcgccgttttcatggcatttttctttatccatgccccggtctggctgatgggtgtgattctgtttatcctgggcatcggttacgggatcggtaatgttgcgctgcaggcggcgatgctgaacgaatcgcccgaaaccatggtcggcacaagctccggccttttccaaacatgccggtatttaggctccatcctgtcatcggtgacactcggcgttgtgttcgcaagcggcatgtcaccagcccgtttcctcgtgctgtcagccgttttgattgcagtaagcgcatttttctttctgctcagcttaaaaacggcgcgtgcccgggcagtataacgggaaaagcgcggcaaaaggaagcatgccgcgttttttccttaccgcctcttttttgccaaaacagagagcaaaccaatgctcatccaaattttaatcccgcaaatcatccgcgtccagcaagcacattgtggaaaaccgttttttcaagtaaaatagtgctcagtgaaaaaagagaaaccgggtgaaacgattggattttaacatcaatttcctttccttttatgtcatccagacagacggggagggcgaacaaacaagaaagcagttcaggcactttcaaactttggatcacgaagattatgaggttagcaatgtaaaagactttctcgatggcgaacttgaaaaaattgtaaaaaggaaagtggacaagcatccgaagtccgaacaagtgccgacgaaaatcggccgctttatggtggaaccgggctacggccttgactccaatccgaacttcaatttgtttaaccgtgcgcgcatggcccgcacgatcggtgattttcaaaaagcaagcgaagcctttctcgccgcttatttagacaccaatgctgtcagggacggcgcgtttctcatcgcaaatgcaacgatgcggaaatacttcgatgagccgtttgtttttttgttgaaatgcgatttcgaaccgaaagtcgccgcgattgccgatgaatccactttgctgaaaaaagtggaaatggcgattaccacaaaaggcatgaaatccatccagtatccatacatgccggaagaaggcatgattgaagaatcagagctgaaaattcaccaggcatcccacgcccgttatttcgaagaattcttaaagtatgtggaatacggcgactcgatgccggaaatcatgaaagcgcaagtgaagacgatggtggaagaacattttcaggaagtgctgcatgaagacagcatcgaatacgaacaattggaaaaagaacttgagatttgggaagcaagccccaagcgggcgttacaggagcggttgccggcggaacaggtcatcgaagccgcggcccagattgccgaaaccactccggaagccgatttgcagatgaaactggaccatatttcggtgaatgccctcctttctgattttggtgaaacggtccatcttgccaaaatcggagaccggtatatcacgatcgtcgagtctgaatccatcctctttgaaaaagggttttcgcccgttgaatttctgcagccggacgaactggagaaagtgcttggacggttgaagaagaaagccggggccgggataacggacatcgtaaatgaacaaaaatagcgtgcgcaaatcgcacgctattttttttgcccattattgggggtgatccagtatctttttccctttggatgctgcaggctccgccgaacggccaatgccgaaaacaaaatagcaaaccgtaacaagaccaagaaagacaatacccgcaacaagtgacatcctcgtttcatcattaaaccacatgccgatcaggacagcgattaaaaatgcaatggttacatagttggaaacaggtgcaaacggcattttaaacggatggtttttcatttcagcctttttcatctttctgaactggatctggctgattaaaatgacaaaccacggcaccatccccggcaggacgcttgcgctgtatacatagacgaacagatttttcggtgcgatatagcttagcaccacaccaatcacgaggccggcaagcacaccgattgtacctaaaagcgggacgccgttgcccgacactttcgtgaaaattttcggcgcctggccgtttacgccgagtgtatacagcatccggccggcgctgtagatgccgctgttgcagccggataaggcggcggtgacgacaacaaaattgatgatgccggctgcggccgtaatgccgatttttgcaaaagtcgccacaaacgggctgccgatggaatccagttcattccacggataaagcgtaacaatgacgaaaatggcgccaatatagaagatcaatatgcgccaaatgatattttggatcgcatttttcaatgtatggcgggggtcttttgcttcgcccgccgtaatcccgatcagctcaacgccctggtaggctgccactaccaaagataaggcaaagaagaaacctttcagcccgccggtaaagaaaccgccatgctcccacagattggaaaacccgacggcatgccccccgttgccgatcccgaataaaatgatggcaagcccggcgataatcataaaaataatcgtcaccactttaatcattgcaaaccagaactcaaactccccaaatgattttacagatatgaggttagccgttccgagtatcaccatggctacaaaccccggaatccatgccggcaggtgcggaaaccaaaattgcatgtaagatccaaccgcaatgatttccgacatgccgacaatcacccactggaaccagttgctccaggctgtgagaaaacctgcgagcggatggatgtattgatggccgaatgtggcaaaggaacccgtgcttggctcaacgtagagcatttcccccattgcacgcataataaaaaagataaaaataccggcaatcgcatacgcgagcaacacggacggacctgtccatttaatggttctggcagaccccataaacaacccgacaccgattgtgccgccaatcgcgatcatttgaatatgccgcgcatgcaaccctctgtttaactctcttccttccacgccattcactcccgctgtttttttcaaacatgcttaaaaaatagaaaaatagcattgtcacaaattactttttaattgtaatatgtttttacctaaaatacaattgtttatatacaaggaacaaatattttattataatagaataatttaaatattccttttttcttgtttgagaaaaagaccgcccctgatgaagaggagcagtctttttccgccaattcaaaccgtgcatccggtctggctaccggttatttttttctcttacatcatcattcgattacacttcttttaaacttcatgttctcccctcaacaataccggcatttagcccgctgcaaacagtacataaatccgcgaaaaaatattacctgcttctgctttcatcctattaaaaagcaatattatctacccatcttccttggaaaataaaccaaaatttttatatttgtaaatcctcaaaatttcatttgatttgattttaacagctgtactgcatagcgtccatcagccaattgacgcatctcccgcgtttctccaacgaaaaacgtccttcctacaggtaccaatttattcttttcgggttctcgataagcattctgattgcacgcatctgggcttatcattcatatattttagcgctttcgggcattgcgttcctttttctgtgatttgaatgagcattggtttgctttccaaaagaagtgataaggaaaaagcgcagcaaaaggaagtatgccgcgctttctggttgatggttaatgtagcctgctttcaccttttcttgtaaaatggatggtagcaaaaatagaaagagtggtccggttgataaaaattctaatcattgaagacgatgtgacgctgtttcgtgaggtgaaagaaaggctttcgcagtggtcatttgaagttgcggggatccgcgatttcgggcatgtgatggaggaatttgcggaattccggcctgatctggtggtcattgacatccagcttccgaaatttgacgggttccactggtgccggcagattcgcgcgcactcccatgtcccgatccttttcctttcttcccgcgaccatccgactgatatggtgatggcgatgcagctcggtgcggacgattatgtgcaaaagccttttcatatcgacgtattaatcgccaaaatccaggccattttgcggcgggtatatgcctacacaagcgagcaggcagttttaaaaacatggtgcggggccacaatcgatttgcagaaaaacacggtcgaaaacgaacatggatgcattgaactgtcaaaaaacgaaatgtttattttgaaaattttggtggacatgaaaaaccggattgtcagccgcacgcatctgatcgaatgtttatgggacgatgaaaggtttgtgagcgacaatacattgaccgtgaacgtcaaccgcctgcggaaaaagctttccgcgatcgggctcggcgactgcattgaaacaaaagtgggccagggctatatggcccttgaaaaggatgccggcctatgatccggatgtttcttgccgaacgtaaaagctgggtgattttttttgccgcctgccagctgttgctgcttttcattgcatggcttgatccgcaaatcgcgctttcatctgttctttatattgtttttttagaaacgattgcttttcttctttttcttttctttcgcgcccggaaagaagcaaaattttatcagagccttttagaatggggcggggatcttgatacgcgcgacatcgcccgccccggaaccccttttgaacagatcgtgcatcaggccgtacaagcgcaggcggaacatttgcgggcagaaaccgaccggaacgcgtccacggtgcaggaagaacaggatgaattaacagcatgggtacatgaggtcaaaacgccgatgactgccatgcagcttatcattgaccggcttcaagacgaagaagcaaaagtgtcgctcaattatgaatggctgcgcatccaccacctgcttgacaaacagcttcatgaaaaacggatcggcaatatggaaaatgacgtttatatggaaaatgttgaccttaaacgcctgatctaccaggaaatcaaagcgattcagccatggtgcatccaaaaaggcatcggttttgacatttcgcccggggttccggcaattgtgacagatgcaaaatggctgtcgtttatcctccggcaactgctggtgaatgcagtccagtatagttgcgggacagacatctccatttccggaaaaatggcagacggccgcttccatttatcggtggcagacaggggatgcggcattgacccgaaagatttgccgcgcatttttgaaaagggctttacgtcttctgaccgcagccaaaacaggggggcaaccggcctcggcctgtaccttgccaaaagggcggcggaaaaattaaatattgtgcttgctgtccagtcagttcccggcgccggttccacctttacactcatcttcccggaaagaaatggcttgcagcaaattacaggcatgtgacaaaactgtcatatgcttttctgtattgttagccgaaacgaaggaagaagcatgccggcttttctataatgaaatcatatcagaaagggggaaccaatcatgatccttgaagcaaaaaatgtttataaaacgtacggcaacaagtggaacaaacaagaagttttaaaagggattgatttaaatgttgaaaaaggagaattcacgagcattatgggcccgtccggatcagggaaaacgacattgttaaatgtcctttcctcgattgaccggcccagccgcggttccattgaaatcgaaggcaaagcgttgacgaaaatgaaagacaagcagctggcggagttccggaaaaggcatttgggctttattttccaggaataccatttgctcgatacgttaacggtgaaggaaaatatattgctgccgctgtctgtgaaaaaagtttcaaaacgggaggcggacgaaaaattccttgcggttgcggaagaactcgggatcgccgatatccaggacaagtatccgaatgaaatatccggcgggcagaagcagcggacatcagcagcgcgggcgtttgtccatgaaccgagccttatttttgccgacgaaccaacaggcgcgctcgattcaaaatcggcatccgaccttttgaataaattaagccgcctgaacgaaaaaagaaaagcaaccatcttaatggtcacccatgatgcggccgcagccagctattcgggcagggtcattttcatcaaagacgggcagatttattcccaactgcataaaggcaccgaatcaaggcaggatttctatcaggccatcctgaaaacacaggctgtgctaggaggtgtgcagcatgacgattaacggtttgatttaccgcaattttaaaaagaaccttccgcattatgcactgtatattttcgcgctcgccttcagtgctgcattatactttgcgtttgtgacactgcaatacaccccttctctcgacgaagtaaaatcttccgtaaaagggctggccgcgctgaaggtggcgtcggttttgctgatcgtcattgtggccgtttttctcttttatgccaaccatttgtttatcaaaaggcggagcaaggaaatcgggcttttccagctcgtcggcatgacgaaaaaagaagtattccggattttgggcacggagaattttttgctctactacggctcactctttgccggcatctttttcgggtttgcggcatccaggctgctgatgatgctgctgcttcggattattcaggttaaaacaaaggtctctctttatttttcgatccaggctttcgagcagacgatccttgttttttccatcattttcgtcctgatcctgctcatcaacagcatctttatcaaacggcaaacaatcctttccctcttccgcaccgtttcatccacggaagaccgggccgcacggatgtcaaaagcggggatggtgctcgggataaccggatttgtctgcatcggggcaggatactatatttcatcaaaattattcaatggggactttcggacggcgcgtgccttgtttaccgcaatgggaaccattttagcccttgtcattctcgggacctacctattttttaagacttctgtccgctttgtcttttaccttatccggaaaaagaaaggcgggtatctgaatatccgggatgtcatgtccctgtccgccatcatgtttcggatccgttcgaacgcagtgctgctgaccatcatcacaaccgtgtcggcacttgcgatcggcttattatcattaagctacattaccttttactctgccgaagatacagcccataatgtagcagctgcggacttttcttttatcaaaacgaatgaggcgaaacaatttacaaaacgtttaaatgaaaaccgcatcgcctatgaaaaagaagaaattgcagtcgtacgggttacagctgatttaagcagcctgttcgataaaaaaacaaaagatctgaagtttgataccggcgccgtgccgatcgcagttgtcagcgatgcggcagtgaaaagatttgatgtaaaacccgggcaggcggtcttttccggctatcccgatgccctggcaaaatttatgccgatgaaatcggaagggatgattgacttaacaggcaagcggaaaacagccagactccgcatcgttgcgcttcgcaaagaccagattctttccaattatttctctggcagcatgcccgttctagtgacggatgatgcgttcttccaagatttaaaaaaggatacggacccgaaaattcaattggattcaaagcgctttaccggcatcaatctgaagaaggaggaagatcttggcaaagcagaccgactgttccaaagtctgcacttcccttcagattcctttgcctattccagccctgaaatcttcaaagcacaaaaagaaaacatgggcgttgcgatgtttattgtcggatttctcgggcttacatttctggtcacgtccggctgcattttgtatttcaagcagatggaagaaagcgaggaagaaaagccgtcctacaccattttgcgcaagcttggctttacaacgcaggatttgacaaagggcatccggatcaagcagctttacaatttcggcattccgcttttgctcggcctttcgcacagctactttgcggtaaaatccggttggttctttttcggatcctcgctgtggacgccgatgctgatcgtgatggttctatatacattgctttattcggtatttgccctgctttctgtggaaggatttaaaaaggcaatacgcaattccttataatgatcaccccttgggtatccaaggggtgatttttccatttccgggattggaaaaagacaagatcatgatgggccgtctccgtgcgggcggcatctcatttgtttccggattcatcgttttaacttggtaatttcttccgacaccacaaaagccaaatcgtcattgccgaataaggataatacattcaacacggtcccgctgctgatttcttctgcttcttctttcggcaccgtcagggcaagcgcttcttccagcaagacgttttttgcctgttgcgggtacgccctgctgtatagttcttccggatctagcccattattcacgcaccattgggcaaaaatgagcgccatcattttctcatccattttgtattgttgtatgattttttcttccatgtcttttttatccatatatacacccctttccgagatccggctgctatcatgatagcgcacttttctttcttttggcgtgttttttcggtttttgtatacaatacgcaacagacggaaatgaaggaggagacccgttggcaaatattgaacagggtgaagtgtttacaattacggaaaacgggcgtgagcaggaagtggaaatcatcggtgtattgtcgctggaaggaaccgaatatgccgccgtttcatttgttgaagatttagaggaacagacaggccgggacctggatgtgtttttcttgaaaacagacgaagaaggcgacctggacgccctccattcagacgaagaatacgaaaaagtttctgccgctttcagccgggtgctgggcggggaagatgccccacaacctggcggccgggattaaaaaacagaaaggggcagggcaaagtgttttgaggccatcgccactgaacaattcgtaaagccggcatttgcttgccccaccttcctgctccggaacgcacggctgcccggccttaagccggcgtgcgcggggccgtaaagccgcggcagatcgtttattttaccgtccgggcacgttcccccgccaaacgggaggcaatatgctttgctgcagcagccccctgcccggccgcccctgcaatactggaataaagcgggccgaggcagttgtccccgattgcatacagccattcgcacctggttttcccgtaaccgtccgatacgatgtacccgtctgcatccgtcccggcaacatgctgaacgaggccgctgttcggttccatcccgatccggacgaagaccgcggataccggcaaaaaacaagattctccgcttaaacggaccagttccacagcttcggtttggtcttccccgataatggctttcacacgcctattcggcaaaatccggatgttctgataagattgggcccggctgagataagcctgcctggccctgaaacgttccgagcggtgaatgaggtagacgtgcgcccctgcttctgcaagcaaacaagcgccctcaaaagcacggtcgccgccgccgacaactgcaacagatttccctttaaacaaatggctgtccttcgtagctgaatacatttccccgcgggcgaacatctctttttcccccggcacgccaagttttctccgtacggcaccggcagcgtaaatcaggtagcgaaaaccgatcctggtcttaagcccgcctgtttccgccaccgcaacttttccggcgccatctatttttacggcgcgcgtattcacccggtaccggcactgcaacgactcggcatgccggacaaaaaggttgcgcatttcctccccgttttccgcttgcaggccgggataatcaataatgcgattatggatcagcctgagctgcccgccaagcatttctttttcctcaatgagcagatggtccatgccaagccggctgcaccagatcgctgctgaaatgccggcagggccgcccccgatgatcaatatgtccacatccagcataaacaccatccttctttttctatttgagcaaggataaaaattcggcgcgcaaatccgcccgcccttcaaaaatgccgcggtaggacatcgttgtcgtggacgcatccgcctttttcacgccccgcccgcacatgcacatatgcttggcctctaaaaccaccatcgtgccctgcggttcaagcacctcttccaccgcatccgcaatttgttttgtcagccgttcctggacctgaaaacgcctggcgtagccgtcgaccatgcgcgcaattttcgacaggccggtgattttttcgtttggcaaataggcgacatgcgcgacgccgaaaaatggcgcgaagtggtgctcgcatatggaataaaattcgatatcttttacgagtacgagctccttatggtcgtggtcgacgtcaaatgtttttgccaaatgcaatttcgggtcttcccggtacccctctgtatattccaaaaaggccttcagcacccggtaaggtgtttcttgcaatccgtcgcggtccggatcatcgccgcataaatcaatcaggctgcggacggcttccataaattggcctgactgctcgagttttttgctgatcacagcaggatgatctatttgatctttaaaagtttcttctattagttgatgtttcttttgtccggaaacaatcatgaatgggtacagctccttttgtaatgaagttttcactatccggctatttaaaagtttacaacggctgcccgattatatcaaatgttgatgccgcaaagtgtaccaagctttttccaaatggacgcttatgcctgggatggatgcggcaacaacggggatgaaaaccggccggcgcatattttcaggacagatggacccaaaaaaagccgcaaatttttgcctgcaagtgaaaaaggcgtttaaaacctgggattctggatatattaaaagcaagaaaggttaaaaattaggaggcattcaacgtggaacatggtacagtaaaatggtttaacagtgaaaaaggctacggttttattgaacgggaaggcggagacgacgtgtttgtccatttctcggccatccagggtgaaggctataaaacgcttgaagaaggccagaaagtatcatttgatgtggaagaaggatcacgcggcccgcaggcggcaaatgttcaaaaagaagactaacggtgccctttgcggcatcgtttttttgcataaaaaaggactcctttccctccgcttttaaatgtcaagccttgatcaatccggattgttcggcgcccgctttccccccccaaaaaaaagaaaccccgtgtctacagggttcatgctgtgcgaacgattatcccgcttttctatatgacggatcgctttccggatattcattcggcaattctttccctgacgcgcaaagcatcagcaagtacgccattccgagcccgtaggtaatcattccccctagcagaaaaccccaaaacaaaatcaaagaccagtccgttgtgttagcgcttacaataaagtgaatggcaagaaaaaccacactcatcaccagctcagcggttgcaagcagatagtaccccttaaattccttcatttcacaaccctcccttttgtatattatattacttcatgttcacaaaatgttcaaattttaaacgcattttttaaaaaaattgcattttagtggacaatacaaaaaagatatgttctaaaacccaaaactgggcagatgcaaccggaattttttgatttttccgcagcaggccgggcattctttcttgtcgtggtgcgcaagaaatgttacgatttagaaaaagaaccaccttggaggagaagaaatggcggaacaatttcagaaagcaacttttgccggcggctgtttttggtgcatggtcaaacctttcgaccagtgggacggcatcgaaaaagtcgtttccgggtacacggggggaacggtcgaaaatccttcgtatgaacaggtaaagaccggaacaactggccattacgaagccgtccaaattacatatgatcccaaagtttttccgtacgaaaaactgctcgaaatcttttggcagcaaatcgatccgaccgatgccggcggccagttccaagaccgcggttctaactaccgggcggccattttttaccataatgaagaacaaaagcggctggcggaagctacaaaacagcagcttgcagaaagcggcaaattcaaaaagccgattgtaactgaaattttgccggcgaagcccttttatcctgccgaagactaccaccaggatttttataagaaaaacccgaatgcctatcacgaagaccgggcgaagtcaggccgcgatacgtttattgcctctcattggggaaaatagcccgttaattagccgtttttacacacctttccgtttgtgattccggccggattgggctatgattacattaagatagaggagaaaggaaggaattggaaatgcgcgataaagtgaaccaattgttatcactcggcctcggcatggcggtgctcagcaaagaacaagtagaaaaggcagtcaaccgcctcgtggaaaaagggaacctgacaaaagcagaatccacacaattgattgatgaactgctggaaaaaggggaacaatccaaacaagaactgaatcaggccttgaaagaccgggtcaacgagatcctttctgaaatgaatgttgcgacaaaagatgaaatcaaggcgctggaacttcgcatccagcagcttgaagaacggttgaacccgtaaatcggttggcccttttgcctggggccggctgtttttttgcataaaacaaaaccgggggtggttgcttgctttccagaaagatgaagcacggaaaaagataccaggaaattgccggcgctctaattaaaaacggcctcggttatttgatcaacgattggggcctttcggatttctttccttttccctcgaaaaaagcggctccccgcatcccccatcgcagcaccggggaaaggatccggctgtttttggaggaattgggcccgacattcattaaactcgggcagctggccagctcccgccgcgacattttgccggaatcgatgattgctgacctggaaaaattgcaggataatgccacgccgtttccgtatgaagacgtaaaaaagattatcagggacgaactcggggcgggcgttgaggagctgtttgctgaatttgatccggaaccgctcgcaactgcatcgatcgggcaggtgcataaagccaaattacatacggaagagccggttgcgatcaaaatccagcgcccgaatatccgcccggtcattgaaaccgatctggaaatattggaaagcctttccctctcccttgagtcccgttttgaatgggcaagggcttaccaattgcgggacattgtcgaagaattttcccaggcgctgttgtccgagcttgattattaccatgaaggccggaatgcggaacggatcgccaaacaatttgaaggcgatgaaaacatccggattccgaaaatttactgggacttttccacaaaaagagtcctgacaatggagtacataaagggcaggaaaatcagcgggtttttcagtgaaaccgtccccgggtaccgaaaaaaagtcatttctgaacggctgatccattcgatgctccagcagatttttgtggaaggatttttccacggcgacccgcatccgggaaacattgtcgttttgcccggcgatgtgatttgctatatggatttcggcatggtcggccggcttacggaagaaaccaagtaccattgcgcctcgctcgtcattgcgctgatgcgggcggatacgaatgccattatgaagtcggttgatgcgcttgcggaaattccggaagaaaccgatcttcatctgctgaaggaagatgtcgaagttctccgcgaaaaatattatgatctgccgctcagccagttaagcttgcgggaagcgatcaatgatttgtaccatctcgcgtttaaataccatatccgcttccctgccgatctgacgatactcggcaaatcgctgattacggtggagggcgtcgtggaatcgcttgacccggaattcagcctgatcgcagctgcgcgcccgttcggggaaaggctgctgcgggatcggttgcggccgggcagggtcgcgcggaaaggatggaaaacgtttttggaccaggcggaaattttgcttgagcttccgaaaaatttgcgcgatatttccaaaacgatgcgaaaaggcaagttcaggatggaggtcgtgataccagatttgcatttatttttggaaaaacttgacaggatcagcaaccggctttcctttgcgatcgtcctgctcgcctttagtatcctgatggtcgggctgatgatcggaacgtccatcagcggccagtcgacagtgatctggaaaaacccgatcattgagatcggattcggtgttgcgacattgatgcttttatggctgctgttgtccatttttaaatcaggaaagttttaaaggagtttagaaaaagatgggtgatcagaaagaaaaagtattatccgggctgcttgtggcaggcgttatatgtattgcagccaacctcaggccggcaatcacttccgtcgggccggttatcggcacgatccgccacagccttcatatgtcaaatgcacaagcgggatttattacgacgctcccgcttcttgccttcgcactgatttcaccgcttgcgcccaaactggcaagccagattggccaggagttgacattgcttcttgggattgtcattttatttatcggcattttggcccgcacggccgggaatgccgccatgctttatatcggcacagcttttgtcgggacaggcattgcaatcgggaatgtgctgctgcccagcctcattaaacaccgggtgcctgaaaaactcgggctgatgacgagtatttatacaaccgttatgggcggatttgctgcgctcgcttccggcgtcagcgtcccgattgtggacgggttggggctcgggtggaaatgggggttgctcgtctggggcatcctctctgtactggctgctttggtatggattccgcaattgcgcaggcacgcgagggtaaagttttctgcccatcaggaaacgcccggaagatccgtctggctgtccccgctcgcctggcaggtgacgctttttctcggcctgcagtcatttctgttttacagcaccatcgcctggcttgcggaaattatggtcagccatggggcaagcctcgtagcggccggttggatggtgtcaatcatgcagttcgtcagcctgcccgctacctttatgacgccgatttgggcggagcggatgaaaaaccagattccccttgttttcggaatcacgattttttatttgtgcgggcttacaggccttctgtacggcgggcatatgttttggatgtggatttgcatcattttgatcggcatcgcccagggcgccagcatcagcctcgcgcttgcgtttatcggcctccgttcgaaaacggccactgaagccgccaatctttccggcatgagccagtcagccggttaccttgtggcggcggccggcccgtttttgatcggctggctgtacgaccgtgcgcacaattggcatatgccggtcgtcatcatgatgatctgcggcatcctcatgcttgccgcaggaaccggcgcagggcggaacaaatatgtatcaagatagagtaaaacagcccggcaaaataccaggctgtttcttaatccacgtatgccaccatgccatcttgatcctcaatttccaggcggatgctgacggcaaacgggtcaatgctatatgcttcttctaaatatttgcggatggcttgaatcagtttcggctcagtcagcggatcgagatctctgccgttcagttcgacatctgcgccgtagccggtatcatcatcgtatgtgagcaccgccatcacattttccggataagcataatgctggtctgccacatacatgcagaccgcgttaatcaaatcctgctccgacagttttaatgtttccatctgtcataggcctcgcgatcttttttcctgttgccaaatatggattggaacaatttgatgacaatgagaatcagcgcaataaagattaaaatattgaccattgccgtcaaagccgtccccaaaccgcccagatggctgaacattgagccgaacagcatgccgccaagtccgccgagcagcatccccttgacaaagctgcctctcgatgaagacgacgccgaattggctttattgccggaaatcggatttgtattttggttcgtttttgactggtaatgggactgttgttttgacgacggtgttgtcgtctttggcaccgactggtaagaccgtttaacggaacggtatcctcttgcgtcaaccgggtttgaaaagtgaatcccgaccactgaaaaggcaaacgtaaatgccaggagcaacgcaaaaaatttcttcaactttatttccccttttctatttttatactaagttcctatgaacctattatatgaacttatcaattaaaatgcaagtctttttcacaaaagaatgtgattcccggtttctatttccccttaaaagccgtctttaaacttttttcaaaaccgggacaggggcaagtcttcttcccggaagcatggaaagtttcgcctgaaaaataaggcatcccccgcagtccggcacagcggggaaaactcgacacccaatgatcattgacttttccatccatcaatcttacgataaaaagtagcatgccaatgtttgggaggtgctgttaatggaactatttcaaatgacacgcagggaaatggcagatctgctgcttgcgctgaagggatcaggcccgatgacgcctgcagcgtttttacaggcattatgggcaaagaaaaatggcggaaaagacccgcaccgtccctttgcagctgctgtaatgccccccattttcacaaaaatactgaagaagaacacggatgacttcggtttttcgttaaatgaaatcgtggcgctcggaagccagattgaaaatacaaattttacactgaccgcgattcaaaactgggtaaagcgcgatattaaagaaatgatcgtggcgccggaaaaagggaaaaaatattcgattgaccagatggcgctgctgtttctggtggaagacttaaaaacggcgcttgatttcgattccatccgcaagctgttgcaattgatcgtcaatgaccccgaagacgagcatgatgatttgattaatccggtacagctgtatgtcacttattcccagctttttgaggaactcaattccatgcgggaagtcgggcggttcccggccggaaaacatgaacatatgatttcggcaatggagggtatgattaccgaaaaagcagaagagatgatatcaaaatacatatcgccggatgacccgaaaaaagaagccatccgcaacaccattgtcatcgcgacgctttccgtttttacggcatattttcaaatgctcgcaaggcggtatttaaccgcaacgatttttttgcaaaatatgtagggggcaggagacttatctcccggcaggtaagtgtttttccggctcccgcgccgcacgccccgaatgggaagcaccgccccggaacagcggcagccccccatttcaactttaacgcagccggaaaacgcctcaccccgctagtaatatttccggcgcagcctctccaaatctttttccgcaccgactgtgaaaatggtatcccccggctgaaagatataatccggtgccggggagacaaccggcgtttcttcagactgggaagtgaccattacaacaagggctttgtacctgttgcggaaatcgagttctgccagagactttccgataaaatcatccggcactgtcatctcaaggccggagcaatacggcgacaggcggatatactgcaaaatgcccgggtttgcaatatggtaggcaacccggcgccccgtttcttcttcagggaaaaacacgtcggtcgcacctgcccctttcaagcccctcccccgcttttgatcattcgccttcgcataaaccgtttcacagccaagatcttttaaagcaagcaccgttaaaatggcagattcaaaatcgtctcctatgctgacgaccaccgcatcgaaattgtccacattcaattcttccaaaaaagcggtgctggtcacatcgccttccgcaagatacgaagcggcgtcttgcagttcctcatcctgaagcaccttttcatttttatcggcgccgacaacatcatatccgagcctcgccagttctttcagcacactcgacccgaaacggccgagcccgagcacaagaaaactttcttttaaatgtttcacaatcccacccctaaccgattaaaatggattcttttgcatatttgattgtggattttttttgattcataaaggtatagatcaaaataatcaccccgagacggccaattagcatgaggaaagccagccagattttgccgaacaccgtcagcccggccgtgatctcgagggaaaagccgcatgtcgacagcgccgacataatttcaaatgcaagcggaaacggcgctgctttttccgtaaaagacaatacaaaaaacgagaaaaagaacaaaaaaagaaaagcgaaaaagacgagaaaggctttgtttacgtcttcggcaaacaacgtccttctgaacatatgcgtctcatttgaaccgcggatgacagaccacaatttggcaagaatgacggcgaatgtggtcgtccggatcccgccggcacagctgcttggcgacccgccgataaacataagcacgatcataaacagcaaagacgggaaagaaaaaacgtgcaaatcgagcgatgccagacccccgcttcttggcgccgcactgaagaaaagggactggatgattttatctgtaaaagaaagccccggcatatgtataaaatctacaaaaaagaagaatagaaagccggccaaaagcaaaatgccgtgcatcaaaacatttactttgaaataaaggcttttctttttccggcgcgactgcaaaaactccattacaacggcgaacccgaggacgcccagaatgatcatacaggttaacacggcgagcacgaacggttcgcctttgaagtcatcaagcccgtttccggaaatttcaaagccggcgtttgtaaatgtcgacactgaaagaaaaaaagcggcaaaagaatggctgccgtgatgcagcgcagccggcagaatcagcagaaagcctgccacttcgacgatcaatgtgtacgttacaataaaggccatcagttttgatatcgaacggctgctgttctggttctggtcaaaaatcatcaatgtttgtgacggaacaggcgcattcgtgcgcaatacgatcaaaagcgcgccgaccaaggccatgacgccgatcccgccgatttccatctggatgagcaggatgatttttccggccgttgtaagtgcctgcgcaacggtaacagtggacagccctgttgcactgatggcgcttgcggatagaaaaaaagcatctgacggcagcaacggctgtttgtgtgaaaccggcagcaaatacaaaatcgcaaaaataaccgtgcccagcaaatacatgaagaaaaccattttaaacgttgccgggcggaactggaacctggacataaaccaatctcccttatgcatcaatcatccctattatacctgaaattttctattcgaaaaaagccagcctgaaaatcatgacctacttttgtttttggattttcggcagacaaaagcggcggggcacaatcctggtttcccgccgcttccatcgcattttttgtgccgttgttccggcatgggctgctgattcaggcaacttcttccacatggtattttttcttcggcaaaaagccggacacggaaaacacaacgagcgccagccagataaaagcaaaggacagcagctgcacatgtgtaaaaggttccttgaaaaaggcaatgcccataatcagcgtcattgtcggcgtcaagtattggaaaaagccgatcatcgtcagggaaattctccttgctccctgcgcaaagcaaatgagcgggatggctgtcacaacgccggtgccgatcagcagtacagtaacagccggtgaaactgttgcaaacgatgcagtgccttttacctggatcatcgttaaatagataaacgcaaccggcatcataaagaaggtttcgaatgtcaggccgataaaagcatcaatatccactttctttttcacaaggccgtaaaacccgaatgtgagcgcaaggccgatggcgatccagggaacatgcccgaagctgaacgtctggattgcgacgccgcatgctgcaagcaggaaagcaatcagctgccacctgttcagtttttccttcaaaaagatcatgccgagcaggatgctgacaagcgggttaatgtaatagcccatgcttgtttcaatgacatgcccgttgttgaccgcccatatgtagataaaccaattcccgctcacaagcacggatgcaagaagcagtaaaagcggcgtgcgcgggtggtggaccccttcttttatgctggtttttaaatcccccattttccttaaaaaggctaaaagcaggatcataaaaataaaagaccagaatatgcggtgcgccagaatttcaagggcaggcacctgttcaaccattttccagtagattggaaaaaggccccacaaaaaatacgcaaaaaacgcgtaaaacattccgcttttttgattgtttcccatttgttgcgtcgcttgtccgggtattacgccttcccccgggccgcctccctcctttcgcataatatatttcattattttaccattattttcagatttgaaaaagcaaatcgctcacagcctttgcttttatcaatgtgccggcggaaatctctgctataatagggaatgtatgatttttcatgaaggaggctgggaaggcatgcgtatatggttggaaaaagcccatgaaaagtggttcagcgggttttggaatccttttattgtcttactgttggcaggggtatttgctgctttttattttgggctaaccggaacgctctgggccgtcacaggcgaatttacccgttggggagggaatttactgcagctgttcggcgttgatacagctgattgggcatattttaaagcgatcaaactgaccggagagccgcaggaccggactgacggatggctggtcatcggtatgctgcttggcagtttgttcagtgcccttgccagcaagaatttcaaatggaagattccccgcctgaaacgacgctgggtgtgggggttctttggcggcatcatcgccggattcggaacgcgccttgcgatgggctgcaatttggctgccttttttacggggctgccgcaattttctctccacgcctggctctttattgccggcaccgcgatcggcacttattttggcgtcaaacttgccgtattgcctatttttaaaggaaaaccaaaaatttcgttcagccggcatgctgccaaaagcacacagccggatccgcaacacgggaactaccagctttatgctgctgttttggttctgcttttcatcgcgctgattgccgcctggtatctcatatccggcaaagtgatgctcgggcttgccgcgctgttcggggcggcatttgggatactgatccagcgcggccaaatttgctttacttccgggctcagggatttatggctgaccgggcggggcacgctcggaaaagcgatcattgccggaatggcgatccagacggcaggcaccgccattttcatttttaaaggcgaagcccctgttatccactgggcaagcccgggtgcccttttcggcggcgtcctgtttggcattggcattgtcattgccgggggctgtgaaacagggtggatgtaccgcattacggagggccaggtgcaattttttgcagtcggcgccggcaatatcgttggggccaccctcctggcatacggatgggatcattggggcattttcaatgtttttgtcaaaggatggccggaagtcaatcttgtaacgtcattcggatggggcggtgcgctcttcggtacgggcgcttttctgctggccctttatcttctcatcgtatggcgggaaaattggtatacgaagaaaataaatgcaaaacgcacgttattcgaaaagaaaacgtctgcgtaatcaggaggcggaaataatggcggaaaattttactgtggatgcaacattggatgtccgcggcgaatcatgcccgtatccggagctttacacgcttgaggcaatcgaaaaattagaaggcggggaaatattggaagtgatcgccgactgcccgcaatcttttatcaacgtgccggcgtcgtgcaaacggcacgggcatgaagtgctctcaaaagtgaaggacggaacgacgctgtattattacatccgggtttgtaaatgattccgctgtgccgggcatttacatgatggaaaaggggctgtccaaaaagtcattctttatggccttttggatgcccttttttacatgattcccacaaaaaattgccctttccagtaaatgtaagtggccaagccaacactacagaaagggcgatttttttatgcgcaatcaaatcattacgctactgcaaatgatcccatgtcaatgtcactttttccagaggaacaagaaagaaaactcctttccattaccatttctcgattttttttcggtcgcctttgctgttgccttttttggcggaacgggcccgcagttcggcttccacttccgatagttttacattctggttggacagcaggacaaaggtatgaaacaacaaatctgccgtttcgtaaatgagttctgatttgctgttgtttttggcggcgatgacgacctcgcccgcttcttcaataaattttttcgcgattttatcgatgcccttctcaaacagataattggtataggaattttcaaccggctttattttccggctctccacctcgtcttccagcacgtcaaagatgcgccggttggaggggatctccgattccgccgcttccccgttttcatcgagccttgtataaaagcatgtcctttcccccgtgtggcaggcagggccctccggatcaacacggattaaaagcgtgtcggcatcacaatccgcctggagcgattttactttttgcgtgtttccgctcgtttcgcctttatgccaaaggctgccgcgggaccgggaataaaaccaggtttctttcgtttcaagtgttttttcgtacgcttcttcattcatataagccagcatgagcacatccccggtcgcatcatcgaccacaattgccggaatcagccctttcgaaaaatcaagcttcacggatgttcaccccttctttgctgcaaatgtcctttacttcccggatggtaaacgtgccgtcgtgaaaaatggaggcggcaagggcagcagaagcccccgtttctttaaacacttcggcaaaatgctccggtttgccgcagccgcccgaggcgatcacgggaatttttacggcgccggcaaccgcttttgtcagcggcaggtcaaagccgtcttttaccccgtcggtatcaacgctcgtcaataaaatttccccagcgccgagccgttctgcttccttcgcccattcaatcgcatcgattccggtatcgatgcggccgccgttcacgacacaagtccatttcccttccgcggctttttttgcatcaatcgccacaacgacgcactgcgcgccgaaacggacggatgcctttcggaccagttccgggtttttgaacgcagccgagttcaccgacactttatcggcgccggcctttaacaggcgggtcacgtcaaaaatcgtccgtacgccgccgccgaccgtaaacgggataaacacattttcagctgtcctttcaaccatattgacgaccgtatcgcgctgttcgtgggtcgcggtaatgtcaagaaaaaccagttcatcagcgccgctttccgaataaaattttgccagctcaacgggatcgccgacattgcggagcccggtaaaatttgtcccttttacgacctgcccgtctttcacatcgaggcacggaataatccgttttgcgatcatcctgccgcccccttgagccggattttgccttcataaaccgctttgccgacaatcccttccctgatgccgattgcatccaggtttttcacgtcttcttcgcttgtgatgccgccggaagcaataatgtcacagctgaccgcttcaatgagcatttttaacgcatcaaggttcgggcctttcatggtgccatccctcgatatatcggtaaagacgatgcgccgcacgcccaagctttctatttcttttgcaaaaccgatgtaatccatttcggtaactgcaagccagccgtgggccgcgactttcccatttcttgcgtcaatgccggcgacgattttctccgggtatgcggcgaccgccgctttaaaaaaatcccggtcttcgatggcggccgtcccgatcacaatccgggaaacgcccatttccgcatatttgcggacggtgtccaaattgcggatgccgccgcctacttcaaccggaacggcggcatgcctgcacaaagaggcaatcagttcaaactgtgcgggccggccggcctttgcgccgtccaaatcgacaatatggaccatttccgcccccatttcaataaagcgttccagctgtgccaccgggtctttcgccacttctgtcgttcggttaaaatccccctggtaaagccttacgcattttccgccaattaaatcgatggccgggatgattctcatgcctgtacctcccaactgctttcctgcaaaaatgtttttaacagtgccatgccggttttgccgcttttttcgggatgaaactgcattccgtacacatgcccgtttttgacaatggccggaatttccgccccgtaatcggttgaagccacaatataagacgcctttgttttcgcctggtaggagtggacgaaatacacatactgatgctgaaacggcgcaaaagccggaaaacccggtttcacatcgagcgtattccagccgatatgcggtaaaatttcatttgccggaatccgttccaccgtccccgggatcaagccgagcccttcggaaacgccattttcaaatcccgtttcaaataacagctgcatcccgagacaaatgccgagaaacggctttttcttcccaagctccgtcaaaaccggccgcaacccgcgcttttcaatctcgtccactgctgctttaaatgcgccgacgccgggcaggatgatgtgggtggcggcgccgagtttttccgggtcgtccgttacggcaaccttaagcccaagcgtgcggaaagcgttcgaggcgcttgcaatattgcccatgccgtagtcgacaattgcgatcattctatcagcccctttgtcgaattgacgcctttgatttccgggtcaacttccactgcctggtgaaacgcccgccccaacgccttaaacagcgactcgattttgtgatgggtgttggcgccgtacagtaccctggcatggagggtaaccgccgcctggaatgcaaacgcctggaaaaattcgcgcacaagctctgtgtcaaaattgccgagcttcgggttttcaaattccgcttcaaaatgcaggaaagggcggccgctgatgtcgagggcgacaaagccgagcgcttcatccatcgggacataggcggagccgtaacgggtgatgccttttttatcgccgagcgcttcacgcaccagctggccgagcacaatcccggtgtcttcgacggtgtggtggctgtcaatgtacaaatcgccgctcgcttttacaacaagcccgatgcgcccgtgccgcgcaaacagttcgagcatgtggtcaaaaaatccgacgcccgtactcacttcaacttccgccggatcgtccagattgacagcaatttcaatcaatgtttcatttgtttttctgctttttgccgctttccgcaacgcactcaccctttcacccgtttttggaccgcccgcgcatgcccttcgagccgctcttgtgcagcaattgccatcacatccggcgccgcttgctgtaaagctttttcaccataatacaaataggtgatttttttataaaaatcatcaacagacaaaccggaagaaaaccgcgccgttcccgatgtcggcaggacgtggttcgggccgccgtaataatcgccgatggcttccggcgtgttttcgccgagaaaaacggagccggcatttttcactttcgacagctgcaagagcgggttttccacctggatttccaagtgttccggggcaagccggtttgaaagcgcaaaagcttcgtctatcgatgcaacaagcacggctgcgctttgcatcttgatggacacttccgcgatgccgcgacgcggaaggacaacaagctgtttttcaagttccgcttttgtttcatttatcagtttctgcgacgtcgtgaggagaaacgttcttgcgcgttcgtcgtgttcggcctgggcgatcagatcggccgctatatatgccgggttggcattttcatcggcaatgatggcgacttccgacgggcctgcgatcagatcgatgccggccgtgccgtatacaagcgatttggcggcggcgacatatgcgttcccagggccggcaattttatcgactgcaggaatcgtttccgtgccgtatgcaagcgccccgatcgcctggatgccgccaagtttgtaaatggtgccgacaccggcaatatcggccgctacggacaaaacaggggcaattttcgtgccgtttctggccggtgtcgccatgaccacttcttctacgccggcaaggacagcggggatcgcgttcataaggacggatgacggatagcaggcggtcccgcccggcacataaatcccggctttttccaccggccggaacagctggcctgaaatgatattttcattcatttccatgatccgggagttttgcagctgtttcgcgtggaaacggcggatattttccgctgctttttgcaaggcggaaatcacatcctgcggaacttcgcgccatgcctgtatgcgttcttccggagaaacttcccacggttccggcacttccccgtcaaattgggcggcatattttttcacggcggcatccccgtttaagcggatgtcttccagcacttccttcgcggtgcggagcacgtcttcatcgtgcgtgccgctcttgtttttcgattgcagaaacgtttcggcaaatgctttttttgtgtattcccgtatcattttgcgaccccttctccctgtagtttttcaataaacggccggattgcctgcttttttatttttaacgtcgaccggttggcgatcagccgcgctgtgaccggccggatctcctctatgacggcaagcccgttttctctcaatgtgttacccgtttccacgatgtcgacaattgcatcagcaaggccgacgatcggcgcgagttcaacggagccttcgagtttcacgatgtctaccgattcccctttttcgcggaaaaattgctctgttacattcgggtatttggtggcgatccggcatttccggtgatggcggacagcctccggtttacctgcaagggcaaaccggcattttccgaatggaagcggcattaagtcgaaaacatcgggatgcgtttccgccaaaatgtcctcgccgacaatgccaagatcgcaaatgccgtactctacatatgttgcaacatcaaagccttttacgaaaatgcaggtgaatgcatccgtttcaacgaggagctttctccctttttcaacgagcggttcaacatgaaagccgcgcgactttaaatattgcaaaaattgtttttccactctcccttttgtaagggcaatgctgatcgtcaaatttcttccgcctcccaatggccgcccacgtttttaaacttgaggaccttactgaattcgccttctgcaggcggcccgaaacggatatccacgattttcccgccgtatgcagcccgcagcttttctgcttccgcaagcgtttcttccccggcaatgatacagattttttccggcttttcttcctgaaccagttcctctgccagaatatcggcgtcaaaagcaatgccgacagctgttgtttggcggtggaactgttcgtacagcatgtcgtaccgcccgccggaaaagcaggaagcgccggtttgttttaaaaatccccggaacaaaatgccggtataatagggcagatttttcacccggccaaggtcaatcatgatgtcttccattccgacagccatgcaaattttgccaagcttttcgatatgggcaagcatattgaaaagtgccgggtccgttttccatctttcctggaatgtccggatcatttcgaacgggccgtacgcatccacaagccccgccagttccgcggccatcgctgcattgccgcataaacttgcaatctcgtatacttcatctttccgtttatcgtgcatggcccctcttaaccggtcaacctggccttcttccaggttgaggcgtgcgaccagttcctcaaaaatgccggcatggccgagctccaccatcaccccggtaacaccaagcctgttaaaaaaggcatgggcaaaaaacaggcattcgccttcgcctaaaagttccggcagtcccaccatttcgatcccgacctgtcggctctcaaggccgggggtatccatcctgaacaccgaaccctggtaagcccatttacacgcccggaacggtttttgcgaaagcgcccttgcgatggatgttgtccagtccgggcgcaaaacttcaatctggccgcggccgtcaaaccatttcagcatattttgaagcttcatgccgaccttttcatttgtaaacgtatccgcgtactcaacaagcggtgtcgagatttccatataattccgctcctttgccgtgtgacggaacatttcaaacacggttgcgcggtttttgacaatcgtgcccatttcatcctggctgccttccggtaaaaacatcggtttcacatcctgtactttctctttattatgttatcactctaatacgctaaaggattggattgcatttaagataccatatttcagaaaagcggtcaaggtgaaaatttctggcgagccggcttgtcttggccgatttggaaatagagcggataatgggcggcgcatccggggttaaaaggcgcgccgcaatgcgggcaagcgcttgcccccatatattcccggatggccatttcatgcttgcagacgccgcaaagaaccgcttttgtatcccattcccgtttttcccaccgctcggccgggtgggcttcttcttcctcatggcatttataacacggataatactttccgcaacatttaaagcggatggctacgacatccaacggggaagcataatggatgcagcgcgtctcttcatctacaaccggtccgtacactttcattggaaccgctccttttgaaatcttttctttgtttttaacatacaggaatttggctttcacatcaatgaaacgggcgcaaaaaagctggcggtcccgagccggaaaagggctatttaaataatgactttttcttattcccttttaaaatatcgcctgtccatcctttccggtacaaataaatataaagcaggatggtattcacgacaatcaggccgagcgctgcaatatagccgtagcgccaggagagttccggcatgtttttaaagttcatgccccataaggcgctccaggcggaaatcggggtaaacagcgtcgttaaaacggtcaaagttttcataatcgaatttcccctgtggcctgagacgacttcttccactttgagcagtgtatcgatttcctgctggtaatcctgcaaaagcgcaaggcatctttcgattttcatcaccctttgctggacttgcggatattccaaaatatcagtgccaaatccttcctgcatgccgtataaaatttctttcaccgggaccatcaaattccggcagacgagcagttcgtggcggcgttcgtatattttatcgagcgtgtcaatatcgtttcttttctggatctcccagatcagttcgtttaatttgatttcaaattcgtctattttatcaaggtaattgtttacgatcgcgccgatgataataaaaaatgcctcaatggcattgcgggaataggccatctgcccgatcactttttcgatttccgtatttttcagcttggaaaaatcaagatctaccgtcaacagtgtctgttcggtaatgtaaaagtgaaacatatcatgttcctcacggttgatcgtgtgctggtcaaaaataagcgaaccttcgacaaacggccggtcattttggtccgtatcaatcgttaaagtgtttgtatcatcattttttatattttcaatccatgttttgcattcctcgttttcatcaataatccgtgcaatttctttctcgcctacactttccagctgataccatttccagttgttttccttgtttttatacagatgtaacaaacgtcttccccctttctcttcccttccttattcccacttgattcccacttgcctgctagaccaaacgtttctcttactttgccggcttctttccggccgccccgccttgctctgtattcgggcctgtagaagacagagcagaaagaaacatccgggacttgtacataaaccggcctgctttatcaaacagtatgtaaggtaaaggagggaaccgggatgggtaaccagaagcaaccatctaaagcgacaaaaaacggcagcctggcgtggtggcagctttcgcttgtgggtgtcggctgtacgatcggaaccggatattttctcggatcaggtatcgggatcaaaacgaccggcccttccatcgtattgtcattcctgattgcagccgccggtacatacattgttttccgcgcgcttgcaaaaatgacggcacgcgacccgcacgaaggctcgttttgctattatgcaaaaaaagcttacggcaactgggcaggtttcagttgcggctggaattactggtgttcgaatgtgctcattatggggagccagctgactgcattgtctattttaacaaaattctggtttcatacggtgccgttatggatactggccgccatttacgcagccctttccattgccgttgttctgcttggcacaaaaggttttgataaggtggaaaacattctcgctgtcatcaaaacggccgccatcatcatgtttattgtgcttgccttttgtgccctttttggctggattgacggcggcaagggaacgggcgggcgcctccctgatggtctccacggctattttccccatggcattgcgggattttgggcttcgctcatttatgcgttttatgcgtttggcggcattgaagtgatcgggttgatggcgatgcaattgaaaaacaaagaagatgccccgaaagccggatcaattatgctggccgttttaacgatgttttacatcgtctcgctcggtcttgccgtcacaatggaacactacacggcttttaatgataaagaaagcccgtttgtcaaggcaatggcggactatcatctcgcttttttcccccacatctttaacggcgccattatcattgccggtttttcgacgatgacggctgcgctgttcggggtcaccaatttgctcgtaaccttgtcgaatgacggggatgcgccaaaatggttcggaaaaaaaatgaaaaaatggaaaaacctcccgcttccttcgctcgggcttgcggcttgcggcctcgttctttccattattacggcccttttgctgccggggaaaatttatgaatacattacaacagcagccgggattttgctgctgatgaactggctgtttattatcctttcggctttccgcgtcttaaaactaaacggaggcggaaaaatcacggccgcagccggcatctttttcctgctgcttgcgatcagcgggacactggcggaaacagaaatccgccccgggttttatgccagttttatcgtcatggtgatcattattgccattgccgttttcatgagccggaagaaaaaacaggctccgcacaaaccggcccttgaataatcagcggccggtttgttgctttgcaaaaataaaccggagtttcccgtcctcccatttcaattttgcatcgaaggttttgccatttttccggaatcccctgatcatgcttgtttcttcgccggccagcagtttccttgcattggctaggctgatttttttgccaaggatcgattttgacagcgtaaaggcgcagcccgatttccggtaggcgctgcagccgtaaaaattgcctttgtcaacaatgtcgccgccgcatgtcgggcatttgcccgcttttttcccgattgtatattttgatcccggccttttgatgccatccgtttttaagccagaaaaatcccattcggccgctgcctgaacagcatcttgcacaattttttcggacagctttttcgtctgttccataaaagcggctgcttcggccgcccctttcccgatttcgcggagccgtttttcccattttgcggtcatttccggagaggccagaattttgccgccgatggcacggatgagcactttcgccttatcggtggcatatacctggttctttttcacctcaatatacttccgatcttttaaaatggtaatgacgccggcccttgttgcttccgtgccgagcccttccacttccgccatgactttttccagttccccgtcctcaatatattttccggccgttttcatcagcgtgatgagctggccttccgtataccgtttcggcggctgcgttttgccttcttttacgtttgcatcttttacaatccctttttccccctgctttacatccggcaaaacgccgcctttttccttctcttttgaaaaaatgactttgcgccagccttccgcttccatttgcgtacccttggaaagaaagactgcacggctgtccacgaccgttttcaccgtcgtgtaatgaaaaacggcattgccgtaatgggcggcaatgaggcggcggacgatcatatcataaatttttttctcgccgtccggaagactgcctggcgccgccacctgttcggtcgggataatcgcgtagtggtcggaaacctttttctcattcacataacgcttattttgaaggatggagcgctttggaagcgggaaatacggagcatattccgggaaggcagataatttttccaaaataccgggaaaagtttcggcttccccttttgtcacatactgggaatcagaacggggataggaaacgatccctttttggtagagggattggacaagatcaagcgtttttttcggcggaaattgaaaagcccggttcgcggttgcctgcaaagatgataagttaaacaacagcgggggctggaattcctttttttctttttttaatgctgcaacttctgccggtttttgccggcaaaatgcggcaatccgcgctgccatggccgggtcattcaaacgcgattcgccatctttcacccatttgccttcgtattgtttgtcatcaaattgaaacattgcggtgacttcccaaaacggttcgggtttgaaatgttcaatttccagctccctttttacaattaaagcgagcgtaggcgtctggacgcggccgacggaaaagacatcacgcatgcctttttgccttaaaagcaggctgtagacacgggaggcattcatgccgaccagccagtctgcacaggcgcgggcatatgcttcgtcatataatgggcgggtgtcttcatcatgtaataaatggcggaacccttcccggatcgactgaggggttaaagacgagatccacaagcgccgtagcggttttttggcgccgcacaaatgaaggatgttgcggatgatcagttctccttcgcggccggcatcgcctgcatggataatattggtcacgcgtgcgtctttcaccagttttttgacgatttgaaattgcttgtatttcggctttgtcacttcatatttgaattttttcgggagaatcggcagcgtttccagtttccactgcttccaggcgggattgtaatgttccggcgggacgagctgggttaaatggccgatcgcccacgtgcagaaagcgccttccgggaagatctcattcggccggatttcaatatacccctcccgtttcacatgcggaaaaaccgagcaaagggtgcgcccctggtcaggcttttcggcgatgatcaatggaaaagacaaacggatcactcctttctttttctagctctactttacaatgtttttcacacgctgccaagaaaaaataaacgcccggccgggtaaatccttttcctctggatttacgcggccgggcggtgtttcaaaatgcggtacttcccccatcgttcacgtcacttcctgaatgttttctgttttgccgtaccgggtgcaagtaacggatctccatccgtacgcctgttaatccagtacggtgatttggatcgtacggcgcccccagttggcggcttttcctgaatccgggacgaggacatcgatacggtttcctttgatggctccgcccgtatcgcctgcaacagcggtcccgtaaccttcgacatatacttttgaaccgagcggaattacattcggatcgacggcaatcacttttgcattcggattatttttaacattgatgcctgtcgctgtaacgccggagcagcccggatcattggctgtataagcggtcgcggtgacggtcatcgtttttccctgcggttttggagccgcctctttggaagattccacgtgcacggtcggctttttcacgtccacttttgcattttccgtgtttgtttgcggctttacggaaacttccgctgcacgttcttttactgtcactttgctgttcggattggaacgaatcacgatttgatcatgcgggaaaatgacatccgatgacagatcgttccattcttttatttgttcaaccggcacgccgtattttttcgagatatccgacagcgtgtcaccggctttaacgacataaacgtttttcggggaaatggttaacttttgtgaaggataaatcatttcggtagaaagttggttattttgttttaatgttttaacggatgtattgtatttttgagagatcccccaaagtgtatcccccggttttacggtataagtatccggcgctgcggcttgtgcattgacagccattacgcttgtgattgtcaccgcagctgcaagtgctgatactgcttttttcataaattgtaacctcctctttttgccggcttttgtgccaacaccgtaaatcctaacacacggatttaacaggcggataacggcaaaatgttgatttggttacacaaaaacgcttctttgtaatcccgtgaaaaatttgtaacataggcataaagtcacgaattcgcgcatagaagcagaaaaacaccgtcgaattgcggcggtgtttgcagcactttagtcctgttgatcgatttttttcagcggttctttcgccggcccttctaccacttcgcctgtacaagcaaaccgcgaaccgtggcacgggcagtcccatgtgcggtctcccgagttccatttcacttcacagcccatatgggtacatgtcgtatcgaccagatagaggttcccgtcctggtctttgtaggcgcctgcccgctttccgttaatacggacaacggccccttcgtcattttttaacgcatctaaagattgatcccgcatgtcaagttttcctttgacgagctgcccggcaacgtcggtattcgcaggtgtgtacagatgcaaatgtatttgcacgtcatggtatgccctttttccgttttaatttttaatgggctgccaaaatcgatatctttcgcagtggtttgttcaaaaatcgggacattttttgtccattaaatattcaatcagtgcttttcagtacgaaagcggatggaactgtgcctgcccggccattttcaccgcttttttcccgggaatcccgtccggcagcgaaccgatccattctcccgggatgccgagggtttcatacgcctgcatttctttttccagtttttcaatatatgcatcggaattggtatagagaaaggcatcctgccgcgaaaaatcacagcggatcccgtgcttcaggatcgtttgttcaatgaacgatgcagcggtttcgtttgctttgtaataaagggatgctttttcttttcctatatgctggatcaattcatcataaatgagcccgtgctgtgcggtgatttttgccgtcgtatgcccgcttgtgccatttgcaatggatccggcatcaaacaggattgttttatagccttcgtttgccagcaaataagcggttacaattccggccattccggcgcccgcaacagccacatcggcttctatatcctgcgttaacggcggaaattgcggcatcgtggccgttttgcgccacaacggttcaggagattgcggcattgaagttccgttcatgatttgacctccccgaaagactgatatgtatagtcttccccggggaggccggtctaaacattttgatttagctgttgagcaatttatccgtaatctggcgcatgatatcgcctcttgagatgacaccgacaacacgatctgcctgattgacgaccggaagttttttaaaatggtgtttggccagaatccgcagcgcgttttcaaaatcgtcttcgggccttaccgtatacaattcccgccgtttcataatcttttccaccggaaagtccaggctgtgcgccagtttttcattaaagtcttcctgctcatttaccacgatcgtaatataaaaatcataaacggtccgtgcctttggctgcaaaaagcggatgacatccccgtcactgaccatgccgagcagctttccttccgcatccacgaccggtacgccgccgatccggtggtgggcaagcacctttaacagttcccggatcgtcgtctctttttttaccgtaatgacatcgcggatcataaaatctttgacttccaattttctcgctcctttttatccatccatttacaaattattgtaaacctttgcggggaaggaagcaatgaagaaaccgcctattgtgcgccatccacgtacttcccgtgatccgggagcgcgatttcatcaaatccggagacaagggcctcaagcccttcccgcaagccggcgccggacatcgggatcccgtggccgcaaagagcagtttccggctttaaggcagccaatttttcaactgagcgttttgccgccttccagtcgtttgtaaaatagcgcggcggcccgtttacttcctgcttttgcaccagcactttccaaaattcatcctgtctgacggtgataaatgcgtcccccgcgatcaacacgttgtctgcttccctgaagaacgatacatgcccgttcgaatggccgggcgtatggatccatttccagcccggcagaaacgggaccgtcccgtcttcgggaaggggttggacagccttgccaagatcaactggttcattcggatatatcatggaaatcttcgccagcaggccgccttcaacagtcggatcgggatccggatacgtttcacgcccggttaaatagggcagctccaatggatgtgcaaaaaccggcacgtcccatttttccaataatggcgcaatcgcacccacgtggtcaaaatggccatgcgtcagtaaaaccgcttttggttttgccttttccccgaagcgttcccgcacggctgaaaatatcgcgccggcggaacccggcatgccggcatccacgaggacaaatgtaccggttccggccctgccgatcagacacacatttacaatttggatggtaaagcaatagatatccggcagcaattccctgcctgttccgctttcaatcgaagtcatcgggatgatacggcggccaaacgggtgatgaatgtctttatccataaaatcccctttctttcattattccttctttttatcctttcccgtttctgccggccattacccgttctgccggccatgatcaactgaaaaagcggtgaaaccgaactccggctttacaaggcgcctgtttccataaggcctcctgcctgaagtgaaaacggcaaggcgcagttgccttgccgttttcaagttgcttttacgccgcatgcctgtgctgattgcggtattttgtcagcagctgcggggcggcattaaagaggatcgccgcaacagctgcgcataaaatgccattgccaatcatcgtgacgccgttcgtgatgaaagaatagagaaacgccgactgccctttaggcgcataggaaccccagaaaaacacgccggccacgaaatgccagaaatagcgggcgaaactgccggcaagaacagaaaggcatatccaaaaagtcatcgtgccccttttggcatggcggcagcttctttcgataagcggccgaaaaagcccggcaaacccgatgaatgaaaaagcgaccggatattccatgatgccctgaatcgggttgagaatatcatttgcatcaccggtgacgatctgcagcaagctccaaataaatcccgaagcaacacttgctttaaatccccagcgaaaagcgactacaaaaaccggcagcatggcaaacgacagggaaatcacgtgcgtcacctcaatggacggcagcaagtccagcaaaagcgcaaatgccgcaaagacagccgcttcaatcatggcctgtaaacttaatttgcccataaaaaaatcccccttttggtatgcatgaacataacgaaccatgggaggacaaaagaaattccacatccctacgccggcattaaccggacaggttcaaagggtcagaacatggcgttcactctcagcttaacgctccccctgtggttacgttcatgaatttgtcacctttatgataaactttttgccacagcatttcaacaaaaaatttaattttttggcaataacagctctggaaaattgttttttggcgaattgacgcgttcggatacggcatacatctccatcgcatccgaatcatactgcgcgaggagcggcaacagccggcccggttcagtgaccgtgctgtccagccatttttcttcatcttccttgcgtaaaatcaccggcatccggtcgtgaatttttgccatcatcctgttcgcctttgtcgttaaaatggtgcaagtaaagaccggattcccttcctgatccgtccatttctcccaaagcccggccattgcaaaaatgcccccgttcttaagcgtaatccgcatcggcgcccgggtgccgtcttttcggttccactcaaaaaaagaatcggccggaatgaggcagcgccgccttttcactgcctcccggaaacccggtttctgaaatacagtttcacttctggcattgatcatcttatgcccgattttcggatcttttgcccaggaaggaatcaagccccattttaaaaaacccagtctgtactgcccgcgggcgctgatcacggcagccaccatttgcgaaggcgcgacattataacttttggcatattcactgcccggaaaagaagctttggcatggaacctttcttccagctcatttacagatgccgtcaaagtgtacctcccgcacatccaaatcccgcctttctttctatcctgaaaattttcatccttttccggtgccgcgtatgaagcggcaaagaggtctattttatcccattttacgcaaaaaagcaggcagataaaaaggatttggcccgcttgcaccaaatcctttctctgttccggaacacgccgcgttttaaccctgcccccgggcttcggatggttgcagtggatcccggtttttttctctttttttcacatgccgccctcaggcaccttgtttctttcaagaaaataccgcttttgaagcaaggaatcgctccggccgtttccgggcgggcacggtttccatcccctttttcaccatccgctttccgaatcgtaaggttaaaagccgcgccggttaccggtttaacgccgcgtcttcttcttcgatccggcgcagccgttcagctactttttccggtgtaaggccgtgttcttttacatataaattatttggcacggtgcggcattcatgcgagcagctccgcatatatttatgttcattttcttccgagcataaaaattgcttgttgcaggctgggttggcgcagttgacataacgttcgcacggttcccccgtaaaataatcccggccgacaacgacatgttcctttcgattgaccggaacggaaatccgttcgtcaaatacatacagtttgccgtcccacagctctccctgcacttccggatcctttccgtatgtcacaatcccgccgtgcagttggccgacatcttcaaacccttcttccagcagccagcccgaaaatttttcacaacggatgccgccggtgcaatacgtcacaatttttttgccttttaattgatccttatgttcgcgcacccattccggcagttcgcggaaagtgcggatatccgggcgcaatgccccgcggaaatgcccgagatcatactcatagtcattgcgcgcatccagtacgacggtatcttcagccagcagcgcctcgcgaaattctttcggagacaaatatttccccgttttttcattcggattgatgtctttttcaagccgcagcgtaacaagctccttgcgcgggcggacgtgcatttttttaaacgcatggccgtctgcttcatcttctttgaagaccatgtcccggaaccggggatctgcgtgcatcttttctttatatttggttgtttgttcaaccgttccggaaacggtgccgttgatcccttctttggcaacgaggatacgcccctttaaaccggtctctttgcaaaactgcaaatgttcagctgcaaaggcttccggattttcaatttcaacatacttgtaatacaataagactctgtacggctttgtttgttccattatcgataaccacctatccaattatatttgcaagatataatgcaggctttcaggttacactgtctcttacaaaccaccattttaccaaaagcccgtttgcatttcaaaattttcactgtgaaaacagaagaaacgaaatcatttatcaatcctgtttgatgcgttatacttgttcagacaggaataaaagaaaggtgttatgcaatgaaatcgcttgtactcgccgaaaagccgagcgtcgggcgcgaacttgcgcgcgtcctcggctgcacggaaaataaaaaacgttatattgaggggccgcgctatatcgtgacatgggcgctcggccatttgatcgaactgaaaatgccggaagattatcatccgaaatataaagaatggcgcatggaagacctgccgattcttccggataaaatggaaaccaaaacaatccggcagacatatccgcaatataaagtgatcgaacagctcggcaaaagaagcgacatcaaagactgtattatcgcaaccgatgccgggcgcgaaggcgaacttgtcgcacgctggattctggaaaaaatgcgctggaaaaaaccggtaaaacggttatggatatcttcccagaccgacaaagcgattaaagacgggttcaagcaattaaaaccggcaaagcagtatgacaatctgtaccgctccgccgtctgccgcagcgaagcagactggctgatcgggttgaacgtgtcccgcgctttaaccgtgaaatacaacgacccgctctccgccgggcgcgtgcagacgccgacattggcgatggtgctcgagcgcgaacgggaaatccagtcttttgtgccgaaaaaatactggaccattgaagcgctcgccggaaaactcgaagtgtcatatgaccataacggcgagaaacggatatttgatgagcaaaaagcaaatgccatacacgcggctttatccgggcagactgccgttgtaacacaagtgatccgcaaacagaagcaagagcagcagccgctcccttacgacttgacggaactgcaacgcgacgccaaccaccgcttcggttttacagcaaagaaaacattgaacgtgctgcaaaacttatatgaacagcataaactcgttacctatccgcgcaccgattcgaaatatttgacgaaagatatggaaaacacgatgtacgaccggctgcttgcggtgaaagatgcgtacaaagaagaagttcagccggtcctttcccggaaaggcaacatactggccaaacgtgtcatcaatgatgcaaaggtgacggaccaccatgcgattattccaacggatgaacgcccggccttgccggatttatctgccgatgaacggaaaatctatgatctgatcgtaaaacggttccttgcgctgttctacccggtttatgaatatgaaaccgtccaatttaagcttcaagcaggcggaaaaaccctggccgggcggacaatggccgtgaaaaatgccgggtttaccgctgttttgcaccatgaacaggaacgggaaaatacggcgctgctttcgatcaaagaaggaaaaacatttaagctggaacaaatccggctcagccagcatttaaccgaagcaccgaaacggtattccgaagcggatattctttcgagaatggaaaaatacgggctcgggacgccggcaacacgcgccgatatcattgaacggctcgtctcctccgaaacgatcagccgtgagtccggccgccttgtgccgacaccgaaaggcaagcagctgatcgaccttgtaaatgacgagttgaaatcgccggaactgaccgcaaaatgggaagaacagcttgaagcgattgcccgcggaaaaggcaacccgaagcagtttttggaaaccatccgccgggaaaccgtacgcctcgtccgtgaaatccggacgagtgacaaaaaataccgcgcccacaatttaacgggaacgaaatgcccggaatgcggttcccttatgaaagaagtaaacggcaaagacgggaaaaagcttgtctgttcaaaccgggaatgccggtttacaaagcggaaaagcccgaaactttccaaccgacgctgcccgacctgccataaaaagatggagattcatcacggcaaatccggcgtgtatttccaatgccgccactgcaatattgtccaaaaagcggacgaaaagaaaaaaactttgtcaaaacatgaagaaaagaaattgctgcaaaaatacacaaagaaagaggaaagtttcggcaacagcctggcagatgctttaaaagccgccttggaaaaagaatagattggatgtttaaaaaagcccggccaagccgggcttttttataaacattttcgcggccaatacgggcaattcggcccctgaaagcgcgccatgccccatgtttcaacacggccggaaaaaatttgaacaacatggaaatgcatatccattcactttttaactttcttataatataattaaattatagatgtttgtaccggtttttctcctctgttataaaaacccgctttttctcatctgtttatatcgggagcgtccttcattgtaaatgttttttcgttctccggttcaaggaaaaatccttggctttggcagaagccgcccttaaaggaacggctcattatgcgtaaagtgtacattatttcacaaaaatatttagaaaggggctaaatatgaaagaaactgcaaaaacatatgcatcattcagacagaagaaaaacaagtgggtgatacttggccagcgctttatctttgtcagcctcggcgcgatgattatgggggttgccctccaacttttccttgtcccgaaccagattctagacggcggcatcaccggcatctcgattatcctctcccaccttgccggctggaaactgggccctattattttcatcttaaacctcccattcttttatatcgggtacaagcaaatcggaaaaacttttgccttgaccaccctttacggcatctccgtcatgtcggtgacaaccgtcctgttgacccccgtaaaagtgtttacggatgatttgctgctgtgtacggttttcggcggcattatccttggcatcggcgtcggccttgtaatccgctggggaggctgccttgacggaacagaagcgcttgccattctattaaacaaaaagcttcctttctctgtcggtgaaattatactcggcctcaatctcttcatttttacctgtgccggctttgtgttcagctggaaatatgccatgtattcggtcattacctattttatcgccacaaaagcaatcgacgtggttgtacaggggctggatgaatccaaatcggtatggatcatcagcgacgagatgtatgacatcggcgaagccattatggcccgcctcggacgcggagtaacctatctgaacggggaaggcgcttatacaggagacaataaaaaagttattttctgcgtcatcacccgccttgaagaagcaaaattgaaatcaattgtagaagaatttgacgaaagcgcctttattgcggttggaaacatatcggaagtgcgcggcggcagatttaagaaaaaagatattcactaacggcgtaaatgaggactgtccatccgggcagccctgtttatatgcacatataactttttccattttcacgctgtccggccatactccccttcccttaaattaggattctttcgtagtgtatggtaaaatgatgattacgattgtaaaacagataaatttaaagtatactttgtactgatctctttaaagtgagtgaatagctttgattcaaaacatcatcgattttgtaaatgatccggccgtctgcacgctgtcattttacgtactggcagcaggttttctttatctcagccggtttgtgatcaggccggcagcgtttgttgaagcaaggcccgccgccatcatgcaggattttactgtacacacccgcccggctgcggaatgccggtgcaatttctttacggtttggattttaagttgtgtcagaatacggacatatccttctgaggatcctgatccggaaccggatttaacgccggccggagagggcaggatttgtgcaatatactgaaggaggatatttcatgaaaagatttttcagcttcacattggttttaagcggtttattgttcgttttgagcgcatgttcaaatacaaacggcgggcacagcggtggatttttccatcattattttgttgccccgttttcaattgtcattaaagcaacggcccagctgcttcatggcgattacgggattgccattattgttttgacgttaatcatccggctgattcttatgccttttatgctgcatacattcaaaaaacagcaaatcatgcaggataaaatgaaagttttgaagccggaaatggataagctgcaggcaaaaatcaaaacggcaaaaacgaaagaagaacaggcaaagcttcagcaggaaatgatggggctgtaccaaaagcacggcgttaacccgctgaatatgggctgcctgccgattatcatccaaatgccgattttaatgggattttattatgcgatccgcggctcaaaagaaattgcaacccactcctttttatggttcaatctcggacaagcggatataccgatggccattctcgccggtgtcatttatttcatccaggcccagatttccctgatcggggtccctgaagaacagaaaaagcaaatgaaatacatgatgctcatgtcgccgatcatgatcctgtttgtttctttttcagctccggcggttctgccgctgtactggacggtgagcgggctgtttatgatcgggcagacgctgattcagaaaaaattttatcagacccatccaccgaaggaagaatcaaattcataattgcatcttgatcgtttggtagtcactaaaatacaaaaaaagcggcgggggcacagttaatgtgttcccgccgctttttgtttttgcatccccggatttccggggattttttatgccggtttacttctgttcagcaactgcctcgttttcctccggctcgtgttcattttgttccatttcctgatgcggttcttccgtatttgctgtatcattcacaaattgatacagcccgcggtccggtttgcggatgcgcggatcgagtttttcgacggatttcataaaagaggtcatattagcgattttaaagccggttttttcttcgatcatccgctgcagttcagcccctctgatcggttccgaaacctcttttaatatttggatggcctcttctctcatcttgctgtattttgcaatagaaagaccccgcagcgaggtacgagcgaggaggctcgccggccgcccgcggaaagcgagtgaatttcgcgcgcctcaacatccccgttatccatctttatacggaaatattacatcttttccgaaaattacaccgagcaagtaaagcacggtagccgaaagtgtacaaaaagagtgtcttggaatacccgatatttaaaccttgtcgagaaaaacttgacacatacccgagcggaagagacaaatagcgctaagagaacaaatgcgcaggcaggagaaaatggaagccttgcaacaggcacaacttgaagtagaggcctttcaaaatcggcttgagatacttttgtccgttcacaaagaatgcagtgaacccattaattggaaaatactctcgcaacaagccccgccgtttgaaaaagggcaacctggaccaaatgaacaagcagccaggaagaaactagaggcgtatgagccaggcttctttgaaaaactgtttcaccgcgatagcgaccggaaaaaacagctgcagaaagaagtggaaaaaggaaaagcgcttgacgttgatttatatgatgaatgggaagcgacgaaggaggttgctgaaagggttctcgccggtgatcccaaagcctataaaatggctattgaaacgatggcgccttttgatgacattgtcgatctgggcagcggttttgattttcattttgtggatcaggacgtcgttgaagtgacgtttcacgttgaaccccaagaggttattccgaaaacggtcaaattattaacaaaaacaggtcggctttcacagcggaaaatggggaaaacgatgttttatgcgtattatcaagattatgtatgcagttgtgttatccgggtggcacgagatttattcgctctacttcctattcggaccgtcgtcattcatgcctgtttagtgcaaaatgaaannnnnnnnnnnnnnnnnnnnnnnnnnnnnnnnnnnnnnnnnnnnnnnnnnnnnnnnnnnnnnnnnnnnnnnnnnnnnnnnnnnnnnnnnnnnnnnnnnnntgactttgaaagcagaaaaaatagatggaaaaattttctaaatgtggataagtcattttatcataaaacatctaaaaactgatgaatttactcttcagaactggcccgacttgcttcttcttgacggccgcgatttccgcacctttctttctttcgtaaggacttcgccgccggaggtttccggcgggacggacgcaagcgtattaaaagatacatattccggtttgccggatgctgtttctgcctgctgaccttctttttcatccagctcccttaatcttttaaaaatatattcccgttctttttgaaattcctgtataacccggatctcagcgtcttccagctgctccaggcggatttttagtgccattctctcattaatcgtcaattttatccctcgtttcttaaaatgtatgtatatatagattataatatgaaactagtaaaataaaaagataaaataattattttttgttagaaaattagtagcgaataattattcataaaggggcatgtcgaatttttgcggttttccacggaatatgttcaaattattcgaatgatttctattgcacctattttttggatttagtagaatattaatgtaagcgctgacaaactggcgcgcaaagcaagtgtataaggaggcttgtctccttgaaattaacataaacggaggggttggaatggaacaattaaccgtgcagttggatgaaagggttcagcatttccttcagggcaaaaagaagatgttcattaacgggcaatttgttgaaagcgcatccggaaaaacatttgacacgccgaatccggctaccggcgaaacgctggctacggtctatgaaggggataaacaagatatcggccgtgccgtacaagccgccagaaaagcatttgatgaaggcccttggccgcggatgaaccctgccgatagaagccggttaatgtataaattggcagatctgatggaagagcaccgggaagcgctggcacagctcgaaacgctcgacaacgggaaaccgatccgcgaaacggcaaatgccgatattccgcttgccattgaacatatgcggtattatgccggctggacaacgaaaatcaccggccagaccattcccgtaaacggcccttactttaactatacccgccatgaaccggtcggggttgtcgggcaaatcatcccttggaacttccctcttttaatggcaatgtggaaaatgggcgccgcgcttgcgaccggctgcacgatcattttaaaaccggctgaacaaacgccgctttccgccctttatttggcgcagctggtgagcgaggccggcttcccggatggcgtcatcaatattgtgccgggctttggggaaactgccggagccgcccttgtcgaccacccgcttgtggataaaattgcctttaccggttccactgaagtcgggaaactgatcatggccaatgcctcgaaaacgctaaaacgggtcacgctcgaacttggcggaaaatccccgaacattattttgccggatgccgacttatcgaaagcgattcctggcgctttaaacggcgtaatgttcaaccaggggcaagtatgctgcgccggttcgcgcgttttcattcaaaagaaacatttcgataatgtcattgccgatatggcctcccacgcccagtcaattaagcagggcttcgggctgaataaagatacggaaatggggccgcttgtttcagatgagcagcaagcgcgcgttttgaattatattgaaaaagggcttgatgaaggggcggaaattgtgacaggcggaaaaaaaccgcgtgaagaaggcttctttgttgaaccgacgatttttgcagatgtccgtgatgagatgacgatcgccaaagaggaaattttcggcccagtcattgcagcaatgccttacgaatccctcgatgaagtaatcagccgcgccaacaacagcgagtacgggcttgcggcaggggtttggacggaaaatgtggccaatgcgcactatattgcaaaccgtctccgagcgggaacggtttgggtcaactgctacaatgtgtttgatgctgcttccccgtttggcggttataaacaatccggcatcgggcgcgagatggggtcctacgcgctccaaaactatacggaagtcaaaagcgtctggatcgccaatccttaaagggcggttaaaaagaaaagcatcggcaaaaccgatgcttttcttttatgcttttaagattccagcagcaaatcttcaggattttcaattaatgttttcaccgttttcaagaaaccgacagcatcttttccatcaatgacgcggtggtcataggaaagcgccacgtacatcatcgggcggatttcaatccggtccccatcgactgcaaccgggcgtttttgaatggtgtgcatgccgaggatgccaacctgtgtcccgttgataatcggcgttgagaacaacgagccaaagacgccgccgtttgtaatcgtaaaggttccgccctgcagatcgcttaatgcaagtttattatcacgtgctttttgggcaaatgcagcaatatccgcttcaatttccgcgaacgatttccggtcgcaatcccggacaaccggcacgacaagcccttcttccgtggataccgcaatgccgatatcataatattttttcaagagcagctcattgccctgaatttccgcattgacatacggatatttcttcaatgccgcaaccactgcttttgtaaagaacgacataaagccgagacgggtgtcatgatctttaacgaactgttctttttttcgctttcttaaatccatgacggccgacatatcaatttcgttgaatgtcgtcagcatcgccgttgtctgtgtcacttcaacgagccgttttgcgatcgtctggcggcggcgtgacatgcggattctttcaaccggtttgccggcttcttctgccacagctttgccggctgcaggtttttccggtgctgccggcgcttttgccgcagcttgcggattgaaggtttccacatcttgtttccttaccctgccaagcggatccactgtcggcacttgcgataagtcaatgcctttttcacgtgccagtttgcgggcagccggagaagcaaccgggcggctttcgctttcttcctgagccggctttggctgctccggggcaggcgcttgtgtttgcgccagcgcctgtgcttgtgccggttgtggtgcttgtgccggttgcggtgcttccgcttcttttggcggcgcggaaggcgttgcgttgttttcccctgttccttcgccgacaatcgcaatgacatcgccgacttggactgtgtccccttcttcaaaaaggagggactggacgacgccttcttcttccgaaatgacttctacatttactttatctgtctcaagttctacaatatattcccctttatctacatggtcccccggatgtttcagccattgtgcaatggttccttccgtgatggattctgccagttcaggcactttaatttcagccacaacacttgtcctcccttaaaagtatcactttttttatatcaaagcctcctccttcatcttccgagcagcgcgggctgcaggatgaagcgggcaaagcaacggttattttgcgcataggaagcccccgccccttgggaaggagcgagccgccgtttaagggcgggtaatggcttcagtcagaattctgttttgttcttttttatggacgaccgggtcgccttccgacgggcttgaccttctcggccggccgatgtatcggatttctgctccctgaggcgccaactttcttaaatacggttcaacaaaagaccaggaacccatattctccggctcctcctgcatccatacaatttctttcgcgtttttaaagcgcgcgaagatttccttcaattcctgttcagggaaaggataaatttgctcgacccttaccgtatgcagccagctcatatccgcaccgtccagcttttcttccaagtctacagccactttcccgctgcaaagcaggattctttcgactgcacccgtattttccgtatccgggccttccagcacggtgtggaatttgccatctaccagtacagacggctctacagatgccagcgggtggcgaagcaggctttttggcgtcatgagaacgagcgggcggatttcttcttttgccagccattttgcctgccttcttaaaatatggaagtattggccggctgtcgagacattcgccactgtccagttattttccgctgccagttgcaggaagcgttccaccctgccgcttgaatgttcagggccttgcccttcgtatccgtgcggcagcatcatgacaagccctgatttttgcccccattttgccctgccggatgaaatgaactggtcaaacatgacctgtgccatgtttgcaaaatcgccgaactgggcttcccaaatgacgagcgtatccggcgaaaagacgttatagccgtattcaaacccgacaacgccggcttcggtcagcgggctgttataaatggcaaatgaagtttgaacgccggatagatgatggtgcggaatatattcttcccccgtctgttcgtcgtgcaggacgagattgcgctgtgcgaacgtgccgcgctgtgtatcctggccggtaaaccggatcggcacgccatcttttaaaatggctgcaaacgcgagcgcttccgcatgggcccagtcaattttcccttttccgtcaaaaacgtgttcgcggcgtttcaaaatccgcgccagttttttaaagacgtggaagttttcaggccaggcgagcaattcagcattccaagccctcagttcctgttccggcacccctgttttcatgctcaaatagccttttttcacattttctgggggctccatggccgtatcgggttctgcttcgccgtctggcactttttcgtaagccgcctgcagttttttctgaacggcttcatcaatcgttttaacctcttcggctgtcaggacgccttcttttacaagctgttcaccgtagatggccctgaccgtcggatgattgtgcaccgcatggtacattaccgggttggttaccatcggttcatccatttcattatggccgtagcggcggtagccgaccaggtcgatcacaaagtctttatggaatttttcgcggtaagcataagcaaacagcgccgcctgtacgcatgcttccggatcatccgcattcacatggaggatcggcacttcatagccttttgccggatcagaagcatattttgttgacctcgagtcgtatgtttcggtcgtaaacccgatattgttattggcgatgatatggatggtcccgcctgtcccgtatccgttcagcttgctcatattcagcgtttctgcgacaatgccctgccccgcaaatgcggcatccccgtggacaagaatcgcaaatgcgcggtccggatcgcggtccggatagcccgctttgttccggttatcctgcgcggcacgtgtatacccttcgacaacagggttggcaacttccagatggcttgggttgttggcaagcacgatacgcgcgccgatcgggccgccgttttgcccttttctgtccgcgccgagatggtatttaacatcgccggtccatccgtacgtaatgccgatcgatccttcggaagggattaaatctttattggaagcatgcttaaattccgcaaaaatgagctcgtatggtttttcaagaatatgggcaagcacattgaggcggcctctgtgcgccatgccgatattaacggttttcacacccgttttgaccgcttccatgatcatttgttccatcagcggaacgagcgcatcaagcccttcaatggaaaaacgcttctgcccgacaaatgtccggtgaataaatttttcaaatccttccacatctgaaaggcgttttaaaatcccgattttctgttcccggccgagttcgcggaaaaagcttcccgattcaactgtccgttgcagccagtgcttttcttccatgtcatgaatatggtcaaactcaaaggcgactttttgggtgtacacttcttttaaataattgatggcatcaagcccgtttttgacccttttgggtgcatccgggcaaataaaggatgccggcacttttttcaaatcttcttcggttaaatcaaattctcccagttcaattcttctgacatccccaacaggtttttggagcgggttgatatccgctgcgagatggccaaaagtccggatattgtccgccaatttgacagcagcgaccattttgctgaaaatcgtcgggtttgccggcaattggaaagaaatatccgcctgcccctgtgtcaggctcccgccttcggaaacagcgggcgcgccccactggtcaaatacttttctcgcctcttcgtcgatgctgtccggatcttccaggtattgttcatataaatccatgacatacccaagattaggcccggaaaaactttcccaaaatccctttggtgtagttgcattcattttgaaaaacctccagctcttcgtcccttattcactttcgtatggtttcgcctggcggatgccaaaacggaaccaagaaattatgtaacgataaagaattttgaaagctgtaacgcttacaaactcaattttagcactgtaagcgtaatagataaagttaaaaactcttattgtatgtgtcaagtttcagaaacgttaaaaagatcgctacacttgcgccgacggaccatttcactttcaaggaacttttttgcagccagtgttttaccgccctcattcgcgcatcacatatcctgttccccgcactgtctggatatagctgtcttcgccttctgtatcaattttattgcgcaagtaccggatgtacacatcgacgacattcgtttcgacctcggtttcatatccccatactttgttcaggagcgcttcacgggtcatgacaatatttttattttccaaaagcgtaagcagcaaatcgtattcccgctttgtcaattcaatggttttccctgcctttttaacaagccggctttctttttccagcacaaggtcacgaaacttgtacgttgttagcgctgcttttttgggctcggcgtactccatccttctgaaaatggctctcagccttgcgagcaattcttcaatcgcaaatggtttgacaatataatcatccgccccatggtcaagcccggatacacggtccataatgctgtcccgagcggtaatcatgatgaccggtgtttctttttcctggcgcaggcggcggcatacttcaaggccgttcagtttcggcagcattaaatcaaggagaatcacatcccactcctcctccaaagccgactgcagcccttcccgcccgtcatacgccactttcacttcgtatccttcatgccttaactccagctcaataaaacgggccagatttttttcatcttccaccaataatatccgtttcatgttcatgatgattcccccccttcaataaagttcaattannnnnnnnnnnnnnnnnnnnnnnnnnnnnnnnnnnnnnnnnnnnnnnnnnnnnnnnnnnnnnnnnnnnnnnnnnnnnnnnnnnnnnnnnnnnnnnnnnnngcgaaaaataaagcgactgtggtctttcccaggcctgggatagccatcatttgcctggctcccggtagatcttctaccaggctttccagttcttgatccaactgttggatttgttgattgtaaagctcatactgctcaagcaggcagtctatttcccgtttggcaaacttcatgccaacttgaatgccaatactctttctggctgcttccacaagctttgttgcctttttgatgccgacacctcttttaacctgtgtcttccatttctcaagcacttcttcaggagtcatttccttgatttgtgaaggaaatggaaaactttttaaggtacaaagggccgctttgccttcccagtctttaaatacgtcaaaaaactccggaaagtagcgctgaataacgttttgaatacggccatctgtgatcataagctgtttaacgagctgatctcttaatttggcgccttctctcagttcggcataaatgccgtccaggagattgggtacggagtatcgcccgtccttaatcagctgtgcaatcactttggcatctttcgtatcatttttcgttggcgaattgtcatccagctctttgcttttcttgacgtgcatcgggttgaccaaaacaaaatcataacccttagccttaagaaaataggcaaggctcagccaaaaatgccctgttggttcaaccccgaaaatcacatggtctttatggttctgttttcttagtctttccatccaatccaacagggtttgaaagccatgaaatcgattttcaaagatcagacgtttgccaaactcaatgcctctgtcatcctgcgctcgtgcgacatgtttgtccttcgctacatcaatgccgataatgagcgttgatgtcgtgatttgcgaaatcttgtgattctgggtataattcatggtgagtcctccctggatatcaattaagggtccattcttgcttttgaagctctggacacctcgtatcataccaggggggctcttttttgtgcaaacctcaaatttccttcattacaggaatgctcctcgaagttcttttgccggaactctttcttttccgctgcccttattatagccccggaaggcgcatgatcaaggagaatccgctttttcttatatactaaccgaatgaaaagaaaaagatatgaatggtttgttaaaaaatgatgagaaagaaaacccgttttttccattcataaatgtctccggttgggcagatagtaaagaagagtgttgacattgaaaagaagaaaggaaaatacagacaatggatcatttaacaacaaacacacctttatccgataaaaacaatgaaatccatcaaaaaagatgggcgattgtggcattatcgtccatccccctgattatgacactggggaattcgatgctgatcccggtccttcccctgatggaggacaaactgggcatctccaaagtccaatccagctatattatcaccttttattcaattgtcgccattttccttattccggttgccggatttttatcggacagatacggccgaaaaatggtcattatcccgtcacttgtgattacggctgccggaggggcgatttcggcatatgctgcctggcaactcgatcacccgtattcccttattttggtcggccggactttgcagggcgtcgggacggccggcgcggcaccgatcgtattgccgcttgtcggcgatatgtttcgccgcaaccgggatgtgagcaccaccctcggcattattgaaacggccaatacatttggaaaagtattgagcccgattctcggatcctttctggcagggttgatctggtttttgccttttgcggccatcccggtcttttgcctgatctctatcctgtctgttttgtttcttgtcaaaaggccggcacaagaaaaacagggtccgggaatcaaagcatttatatcgaatacgaaaaaggtgttccgccagcactggagctggctggcgtccgtatttgcgatcggggccatcgtgatgtttattttgtttgctgtgctgttttatttgtcgtccaatctggaagaccagtacggctaccacggcgtgaagaaagggtttattttggccgtcccgcttgcggcgctgtgcctttcttcctttataacagggaaaatcattaaagaaaacatggtactgatgaaatggattattttctccagtgtgcttattaccggagcctccgtgctcgtgatctccttttcggaccgttttttctatttaatggggacctttctcatttgcggaatcggaatcggtgcctctcttacgccgttagatgcgctgattaaccagtcgattgaaaaagaagtccgcgggacgatcagcgccatttacagttcgatgcgctacatcggcgtggcggcaggcccgttatttatggccaattttatgaaagggcgagttgagatcagcatggtgatcatggccggtttctgcctggtggcggcagggcttacatttgcggcggtgaaaccggacaaatcacgtgctaaagcctcttcccctgcttaattgcggagtcgtgcgatttcaagcatttgtagcgcctttttgtttcaggtaaactgatgataaaggaagtgaaagaaagaagggaatgtcttgggtgaaaacagaccattcaatcggttaattcatgaaaaatcaccttatttgctgcagcacgcccgtaatccggttgactggtatccgtggggcgaagacgcttttgcgaaagcgaagcgggaaaacaagccggtttttgtttccatcggctattcgacctgccactggtgccatgtgatggagcgggagtcttttgaaaatgaagaggtggcgcggatcctgaatgagaaatttgtggcgattaaggtggacagggaagagcggccggatattgatgccatttatatgcttgtttgccaaatgatgactgggcagggcggctggccgttgagcgtatttttgacgccggagaaggtccctttttatgccggaacctattttccgcgggaaagccggtatgggatgcccggttttaaagaagtgttgcattatttatcccaacaatacaccgaaaatccggaccggatcaaggatgtgggggcacaagtcaaacaggcgctcaaggcaagccgggaaaaaggggggcaaacggctttaacgaaagaaacggccgggcgcgctttccaaacttacaagcaggcttttgatccccgctatggcggttttggcagggcgccgaaatttccaatgccgcattcacttgtatttttactcatgtatgccaaattttatgaaaaccgggatgcgcttgcgatggcaacaaaaacattggacgggctggcgcgcgggggaatttatgaccatattggttacggtttttcccgctattccgttgatgaaaaatttttggtgccgcactttgaaaagatgctttatgacaatgcgctgcttgcactggcctataccgatgctttccggatgacgaaaaatgcccggtacaaaaaaataacggaagaaatcatcaagtatgtgctgcgtgatatggcccatccggatggcggattctattccgcggaagatgccgactcggaaggcgaggaaggaaagttttatgtgtggacgcctaaagaagtaaaagatgtgctgggggaacagttgggcacgctcttttgccaggcatacggcattaccgggcagggaaatttcgaaggaaaaaatattccgaaccagattacaacccatttggaaacaattgcaaaaaaggaagggatttctcccgcagcgctggcggaaaaattagaaacggcacggcaaagcttattccagcaccgggaaaagcgggtgcgcccgttccgcgatgataaaattttaacggcatggaacggcttaatgattgcagcactcgcaaaagcggggcgtgttttttatcaaccatcttatgtgcaggctgcagaaaaagcggtttcttttataagggacaacttgatccaaaatggccgggtaatggtaagataccgcgatggcgaagtaaaaaacaaaggttttatagacgaatatgcctttctcctgtggggatatatggaactgtatgagtccacttttgcccctttttatttggcggaagcaaaaagactggccggcaatatgattgatttattttgggacggacatggaggaggctttttctttagcggaaacgacgatgagccattgctcgtcaggcaaaaggcgtcttatgacggggcactgccttccgggaacagtgtcgcagcctgccaattgttaaggctggcgaaactgaccggggattttacgttggaagaaaaagtccagcaaatgtttcaggccttcagcaaggttatccatgatgatcccaatgcccacgccatgatgatgcaggcagtgatgtacgcacagcaggcaacgaaggaagtggtgatcgttatggatgatgaaacagaaaaagctgttgattttatccgccatattcaggagaattttcaccccgaaatttccttcatggcagtaaaaaggcgcgaaaagaagaaactctccaaaatcgccccttttattgaagattatgccatgataaacgggcaaccaaccatttatgtctgtgaaaacttcagctgcaatcaaccgacaaacgattttcaaactgccagggatttgctctttaaaaaatgattgaaaacatgcctgttgaaaaccataaaagaagccggaatgatgcattcacgatatgctttttcctggcacaaaaaacaaaccccggttgcattccaccggggtttgttttctttatttattctttttggctgaatccggaatggaggttttcggcaacccggccatatccgtctggtcaaaggaatagtcatacttgttccggttcaccggcgtaaaaccttttggcgtatagaaacggagcaggtcgtcgtataccactttatcagacagattcagcatctcttttgcaatcttttcatcagttttgcctagttttggattgactttttcaccggtcgcattgtcgtaaagcgttccggatacttgcgtgtacttattggtgacaaaatcaccgttacggaatggaacgacttggcggtgctggctggacaaaagatcagacccgaactggatgtagtcttttgtatcaatgccaagcaaatgcataaccgtcggcatcacatcgacttcaccgccgtacgtatgcttgatcccgccttttgcgcccgggacgtggataaacagcggcaccctttgcagctgtgcgttcaaatatggcgtaatttcaggaacgccgagcactttcgccatcgccgcattgtgattttccgaaatgccataatggtcgccgtacatgacaatcaccgtatggtcataaagcccggattccttcaaataggtgaagaactgctgtatcgcttcatccagataatgggcggtttgaaaatagttatccacggttttatcgccgaaatcgccctttgggaagtctgcatcctcttcatccaaaggaaacggaaagtggtttgaaagcgtaataaacttcgcatagaaaggctgcggcaatttggtcaaatactgcatcgactcattaaaccaaggtttgtccttcatcccgtagtttaacgtatttttgtcgttcatatcgtaatacttggcgtcaaagaaacggtcatagccgaacgatttgtacatttcgtcacggttccagaaagtcttatagtttccgtggaaaacagccgatgtatagcctttctggtcaagaatagcaggcgccgcctggtacgtattttgtgctttcgtcgtaaataccgaccctgtcggcagcgggaacagcgagttttccatcataaattcggcatcagacgttttcccctggcctgtctggtggaaaaagttatcgaaataaaaggtgtttttgtcctttgtcagcgagtttaaaaacggtgtgacctctttgccgtccaatttgtaattgatcaaaaagttctggaacgactcaagtgaaacgtaaatgacattcataccctttgccgcgccgaaatatttgctgtccggctcggtatagttcgctttcacatagttttccacatcgctcacgtcactgctatcagccatcgcccgttgcgcagacgattttgttgtctgaaccgcatcataaagggtgtaattgtacatgccgagatatttcacgatataactgcggtcaaaagtccgcgttaaaagctgcgggcggtccgcttcggcaagaccgagattaaaaatgaaaaatgcaattgcggcaatcatcagcccggcaagcgagcggcggctgaccttctctgcattggccctgacggctttcgttgcaatcaagacaatgaggatgatcgtatcaaaaaagtaaaaaatatcataaggcttcattaatgcagcggcactcccgccgaggtcgccgaagtttttcgtctgcgacagcacaggcagtgtaatgaagtcattaaaaaaacggtaatagcatacattcgcgtacagcaaaacagacaaaagcacgtcaatcacagtcattgcaatgatccggccgcgtcctttaaagaaaagcgcaagcgcaaagaagaacagtgccgaactgatgggattgatggcgagcaaaaatttctgcatgccgttttgcagatccagattgaattccgctttatagacaatataagtttttacccagaacaaaaaaaccatgagaaagtacagggcgtattttttatttagcaaacttttaatctggctaaacgagatcttcattcagtattccctcccaatcgccaaactctccggcaacaatttcaggacgcttcttcattcataccaacatattgtaatacaatttttaaaaaaagcaagcgctcattaacggcttttccagcaccggggcagccctttccggctaaacgcgactgcacggtccgaaaatccgcatacccaccgccaaacatttttattcccaccatattttattacaatttcaattttgtttcaaacaagttcaacgcaagcgcagataaaatgacccaaacaaggccggccgcatatccgccgacaacgtcgctcgggtagtgtacccctaaatagatgcggctgatgccgatggcaagcaccagcaagagggcaaacagcgtccccgcgaacttcacccacctgcgttttgtgatgcggaacagaatcaatacgaggcagccgtataaaatcatggatcccatcgaatgcccgctcgggaagctgtagcccgtttcctggacgacacgcataatatcggggcgctggcgcttgaatatgtattttaatatggtgttaaaaacccccgctccaagcgcgacagatacagcgagataaaggcccagtgtgcggtattttttgatccagagcacaagggaaagcacgagggtgaccaccgccgccccttttacagatccgagaaaggtaacagccagcatcacgctcgttaagcggccggaaatattcccctggacaaatgagataatcggaaggtcaaaatgccggatctccccctggttgaaatgatcggcgatttcaaaaaaaatccaggtgcagagggaaagcaccagtaaaaccaacagccattgcacaatcgtctgccttttcatcatcaacctccaatatgaaataatttaccatattggaggctttccggcaaattttcaggcattccccgcaccggtatccgccggtttttacgcttcttttgcctttgttttagccgctttttttggtttctttgccggtttttttgccggctttgccctgtcgatggaagcctggagcgccgccatcaggtcggtcacattattttccggttctttcactttcgccgtgacgagttttttcccggtccgcttcgattcaatcaaagccatcaggtttgaccggtatgcatccgtatatttttcaggctcaaacgatgtcgttaactggtcaatcagcaaaattgccgtctcaatttcttttttcgagacttcatcatcctgcggcacattcggaacgtcagatgccctccggacttcatccgggtaatggattgtttccatcagcagcgtattttcatacacgcggataacggcgagctgctcctttgaacgcatgacaatccgggcaagcccgactttctctgattcggtcagcgctttccgcaacaagccgtaagcttttacacccccttcattcggggacatgtagtagctccggttaaaataaaccgggtcgatttcccgcatatcgagaaaatccataatttccactgctttttcttctgtctgtttgcgcagctcttccagttcctcctcttccagcacgacaaacttccctttcgcgatttcgtatccttttacaatttctttcgcgtccaattcttccccgcacaccggacaaaccttttcataccggatcggggaatgacattttttatgaagggaacgcaatttgatatctttatcttccgttgcggcatgcagtttgatcgggatattgacgagcccaaaactgatcgtgcctttccacatcgtatgcatgaatgaaacgcctcgctttttgaagataatatagggcttgctgaataagcaaaaattccagatttgacaaggattttggctacttttgtcgaatataaagtgtaaggatttcataggaaacatgtaaaaaaccttgcacttggaggctgttgcgatgtacaaaaagaccgaacatcaattaacttttgtagatgatttttttctacccttcggtggaaaattaaataaagaaaatcgctgggttcgttcagcaagccctaatatatgtatgaatccgccccgctatgtacttcaacttttggaaaaagaaagggtgctcgaaatgaaaccgatgctgccggttttaaaatggtctctgcctgatacaggaaagtgggcatacgaaatcaaatatgacggttatcgcgcgatcctcgactggacaaaaggcggcatgcggttatggagccgcaacggaaaagatttgctgccccagtttccggaaatccgcacctttttgcaaacacttgaaggccgcgtaaaagggcagcttccgttacggcttgacggcgaacttgtgctgcttgaaaatccgtataaagctggctttagggagctgcagcgccgcgggcggatgaaagcgaaggcagctgcagagaaggctaaagtgcgccccgcccattatctcgtatttgatttgctcatgcttggcggggaggatatggccggaaaaccgtatttgcagcgaaaaaaagtattggaaaagttttgtgaaacgcttgctctgccgctctcccccgccccgggcgaaacggcacgggtccagcagatcccgtttacccgtgacgcgcccgccttaaaggagacggtgaaaaattttaacagtgaaggcattgtcgcaaaacaaacggacagcaagtgggaagcgggaaaacgggttgagacatggataaaagtgaaaaattggaaaacagccgcctgctttattacagcttatgacgcgaaaaacgggtatttcgacgcagcggtgtttaaagatggcggcatttttccaatcggccagtttcttttcagcatgaatccgggcgaaaaacaaatcctcgcagaagcagtcaggaaaaatgccgcaaacgatgaaaacggcgtctatacgatcgatccttcgatttgcgtcgagttattttatttggaatgggacggcgccaacctgcgggaaccgcatttccaccgcttccgctttgatctttccccggatgcctgtacatttgaagatttcaggctccgtaacgccgccattccagaagaagtggaagtgacacatccggataaaccactatggaaaaaacggcatgtggcaaaactcgactttcttgcttatatgcggaaaatttccccttttatactgccgtttctttcagacagacttttgaccgtcatccgttacccgaacggcgttttcggcgaagcattttaccagaaaaactgccccgattatgcgcccgtttttgtggatacggcgatgcatgaagacatccggtatattgtctgcaaccatttgaaaacactgatgtggctttcaaaccagcttgcggtggaataccatatcccgtttcagaccgtaaacagccgttttgtcagcgagattgtatttgattttgaccccccttcccggaatgaatttcaacttgcagtagaagcagctttgctattaaaacaggtgacggatgcccttcatttggagagctttgttaaaatttccggcaataaagggctgcaagtctatattccattgccggacgggcagttttcatgggaagatacaaggctgttcacggaatttatggctgcttatttcgtttcgaaatcgcctgaacattttacaatcgaacggatgaagaaaaagcggggcggaaaattgtatgttgatttcgtccagcatgcggaaggaaaaacgatcattgcgccttattcgatgcgggggcatgaggatgcgcttgtggcggcgccgcttttctggaaagaagtaaacgcgtcgctttccccggatcactttaccattgaaacggtcctttcgcgcgtggaccggtacggctgcccgtttgcgcgattctttgcctgcaaaaacggccagccttttgccccggtacttgcatttttaaagcagaacaaagggcgacccatatagttttggcgtagctttccaatggcggcaaatacgcctcccttttacaggaggcgcaaattttaagccaatgctttttctaccgtttcttttgcgtgggtttcgagcttttgatacagcttctgttcgccgaaatcctttttttccgctatccggaactgttccgggtgcccatcgtcaaaagaagcaacggtttcgtataaataggtggcattgccgatcaggtcaatcgtatatgccggttccccttttttatcaattttttggacaaagcaccgcactttaccgccgttattgaatacgtcgatcatctcaccgaacgggcgcaatcttaacaggcaggccacaaggcttgaagcggacatcgccgttccgcacgcatttgtaaaaccgacgccgcgttcaaacgtgcggacgtataaaccattttcatcaattggtttggcaaagctgacattcacgccgtctggaaacaggcaattcggcccgttcacatactcagacagtgttttttgcgtatcagaccggaacacttcatttccgacaaaggcgatcagatgcggattcggcaccgcaaccgccgaaaacgacaaatcttccgacaaggccttaaccggttcattgatgagcacttttttatcaatatgcatcggcagtttgtccaagtcaaaggagacaggcgatatttcgacccggaacgtcgggatgccgtccaatatgggctctgctttgcgggcatatagatttgctttcatcgtttcaattaacagatcgtctttcccgcgtttttcggatacgtaccgcgcaacacaacgcaggccgttcccgcacatagacgcctcggaaccgtctgcattgaatacccgcatttttgcgtctgcctgctggctttccgacacaaagagcaggccgtccgccccgagcccagcatcgcgccggcaaaatgacagggccatttttttgcggatatcgtccgttaacggtgcggagatttccgcttcatcgatcagcaaaaaatcgtttcctgagccgtggcatttaatcagttttacatgcatgatggatttcctctctttttctttctttattcttacaaaaattgtatcatctcttctttttttttacacgaaatatttatcatgcctgtaaaaaaaggcgagcagtgcgatgacgagtacttcgtcttcttccgtcccccgtgtaaaatcaagtaccggcgcattaagcggaaacttctcctgccagctgaccggcatcatgccgcgcgacatcactgccaaaagttgttcgtcccggtaaaattccaaatcatggttcccatttttccggatcgcgcaagtccggctgccgttttcaaatatcatttcttttccttttgcttcttttaatgaaaaggccagttcatatgccgaaaatctgatgctgatttcccagttttgccgtttgcggaccgtggcgcaaaatgtggcgcccgctccccgttcaaggcggaaataccggatttgctgtctgaaagctttttcctcaagcagccatcccaagcggccgcttccgtcataaagctgcaccgagagttttgcaccgggaggaaactggatcaagtactgcccgctgtccgcccgcctttcttcctcccctttgtctccggatatgttttcttctatcttttgatagtagaaatagcgcgcagcaaagtagagaatgaacagccagacggccaaaaccagccagatgaacatgccgccgcgcccgatatacataagcgcgagacaaaatgcggaaaggccgcatgcaagaataacggtttggcacaggtacatgtgagacaacgtcgaataggtttttttcagctccatacagaatctcccgtttttgtctggtcactctattatatgagactttttataaatcatgatggttttacgggtttgcaaatctttcgcaggcatttccattttcatggcaggctgtccatggcggcccggaaaatgaatatgttataattttttggagtccgtggaaaacagttgggggaatgaacatgaaacaaacctttaccttaaaagaaaaaatcgcacagctttggcatttgtttctgccgattctcatcacccagcttgcgatgctgctcatgaattttttcgatacgacgatgtccggccatttttccaaagccgatctggccggcgttgcgatcggcgcatccctctggtttcccgtttcaaccgggctgggaacggttttacaggcggttaccccgatcatttcccatttgatcggcagcaaaaacacggatgacatcccccgtacatttatccagagcctttacgtcgccgtctgtatggccgtactggtgcttcttgcaggcgggcttttgatcgggccggtccttggccggatggatttggcgccgcatgtggagggggtcgcgcaccggtttctatttgctttgtctttcgggctgatcccgttgttctgttaccaggtttgccgctcgctgattgatgcgaccgggctgacaaaaatatcgatgctgatcacgctgttggcgctgcccatcaatattggattgaatgttctgttcatcttcgggcatgccggatttccgcagcttggcggggcaggtgccggcgttgcgagcgccatcacctactggcttatcttgttgattgcaatccttgtgcttatgcgtttgccacgttttgctgaaatgcaactgttccgtacgttttacccggtttcgatccgcagctggaaagcgctgttgtcgcttgggatcccgatggggttgtcgactttttttgaatcgagcattttttcggttgtgacattgtttatgagcaaatttggcactgacacgatcgcttcccatcaggccgccatgaattttgagtcgcttttgtacatgcttccgctcagcatttcgcttgcgatgacgattcttgtcagttttgaagcaggggccggaagatttaaagacgcccgcctgtacagcacaatcgggctcatgaccgctgttgtgatcgccaccttgaccgggctgttactctacttattccatgaacaagtggcggcgttttacagtgatgatccggctgtcatccggttaaccggccattttttgctgtacgccatctttttccaatggtcagatgccgttcaggcgccggtgcaaggcgcgctcagagggtataaagatgtccggattacgaccattatgacgtttatttcatattgggtcatcgggcttccgctcgggtatttgctggatgccgccaccgccctcggcccgtatgcctactggatcgggctgatcacaggccttgctgcaggggcggtaacacttttgtggcgcttgcattatatccagcaaaaagccggagatggactgaaaaagactggataattgtttggcgcaagcggggcttatccggcagatgggtcagcttacaggaaagtggacccgttttccgcaagtgacgtttcaaaaagtgcgtacaaaaaagcagccccgtaaaagaggctgcgataagcaatttattttccaataaactcttgtgtccagtagtggccgttttcaacatagcccacgccgatatgggtgaagtttttatttaaaatattcgccctgtggccttcgctgttcatccatgcattcatgacttcctgcggtgtttgctggcccattgcgatgttttcaccggcatattgataggtgatcccgaattgcttcatcatatcgaacggagagccgtaagtcgggcttgtatggtcaaaatatttatgggttgccatatcattcgatttgacgcgtgccattttgctcaaagccgtatcaattttcagcgcgccaaggccgtttttcgcccgttcttcgtttacaagggtaaccacttgtttttcataggcgtttaacgtgtagccagcctgggactgcgtgctgcctgccggttgcgttgaagtttgtttcgttgaagtttgttgcgttgaagtttgtttcggtgccgattgctttggtgctgctgtttgttccggcgccggttgctttggtgctgccgttgtctggttcgttttgcccgcgttgtttgaagcagtttgatgggttgccggtttaaaagaaaaacggatgttatgttgctttaaccagttctccaattcctgcatgctatgaaacttgtattcatgttgaacaaccgttttcgggctgcagtttgtttcgtttgaggctgcccccgccttgccggaaactgccggcgctaggatcagtgcaagtgctgctgctgttgtgaacatagcctttttcatcaatgatgtcctccctcgttttcgttggtttctctctcgtacacaatagcatcataacatacgatttttgtaatatttctgggagaatatagaacaaacagcaaagaaggggcctgcttgcaaactgaaaatgaaaaaaccagctgtatcaaaggttccggcacattgtgcgaatttcctatcatttcacacattggtaccacctttttaaatatccaaaaaatggagggaatttggggttgacaaggcgggaaacgggcggatattgttacatttttttcttgaatgttgcatgctgccatatttatttaaaaaaagcgccccggggccgggcttacggtttcagggcgctttttgtgtatatgggcacgttttcatatcagtgcatttgattgagatggtcttcaagcttccggaacagcctgtacaatgtttcccgttcttcttccgtaaaaacgttcagctggtcttttagaaactgagatttggtttctttcaactgactgattaacgattttcctttttccgttaaaattaaatcgaccacacgtctgtctttattggatcttttccgctcaatcagccctttttccacgagcgaatcggttacagaagtaatatggctggcggacacttgcagcattttcgacaaatcggatgaacgcatcggggattccgataaaagttttaacaccataaattcgttaagggttacatgctcttttaacaagctatgcagttcttctttaattttacggtatactctgcggaagatgaattccagatcgactgtatcttttgtctccaacactcccattcctttcctttcttataggggacaggcgaatctcctgactttattatatcatttttcgtgcatcggattgcacaaaataagccgggagtagatctcccggcttattttgctatttttctttttggacaacttcttccgcttttttgagctgcgtatcgtgctgcttaataagattgctgacttcagacatcagttttgttgccgtatcgccatttatgatgcctgtcggctgcattttttcatgcatttggaaagcttcgacagccgtttttgtattccagtcgaaatacccgtcaaccctgcccggattgtaaccgagtgctttcagcattttttccgccgtcttcacatcttccgagaccgaatacagtttcaatttcgcatctgttccgatcaccggaagtttggcataatccggaagcggcactttctcatccggctcaatcccttttttatggatccagctgccatttggcgtcagccatttttggacggtgaattttaaaatcgatccgtcgctgaatttttcagcagactgcacggtgcctttgccgtacgatttttcgccgacaagcggaatgcctgccgattcgttcagtgcggccgccaaaatttcagaagcgctcgcgctgccgccgtcgatcatcacaaccgccggaaccgttattttcgtgccgctttctgccacatatttctcccgggatccgttccggtcttccgtctgcagaatcgtatgcccttccggcacgaacatattcgcaattttaatggcctggtcaagcagtccgcccgggtcctggcgcacatcgacaatcatcgacttcatgccctgctttttcattttctcaatggctgccttgaattctttatatgtgccgtctgagaatgtcgtaatctggatatgggcaaccccgtttttgagcatcttcgcataaaccgtattgaccgggattgtgtcgcgtgtcaaggtcactttcgtttcgtctttcgatccggcatgctggatcgtgagtgtcacctttgtcccttttttgcccctgatcaacatgaccgcttcattggcgctcatgccatggacgcttttgccgtcaaccgcgagtattttatcattcggcttcaggccggctttttcagccggggaacccttaatcggcgaaacaatcacaatatatccgtctttttcttccacttcagcaccgattccttcaaaagaagaagaaatggtgttattgaagtctgatgcttccgtttttgacatataatcagaatacgggtcattgagcgattccaccattccgttgatggccccgtcgacaagcgtcttctgttttacttgtgtgtaatattttttctggatgctgtcatatgctttatacagtttggcaaactccggccggttgacagtcgtcacgttgacggctttttggtcgccgaacgcaaaggcagcggtcgtaatgccggctgttatgaaaatcacaaaaaacaaaagcatgacaaatttaaattttttcatacggatatagccggtttgttcttcctgcccggattccgtctgtttcttctcatcgtccaaaggattcaccactttcatgccgttttccaaaagtcaaagttcctgatttctaacttctttattctaccagctttttctttttaataaaagagcccggaatttattcagccttatgtacatgttcgaaatactcttcaagcgtccagccgtgcttgtaaatgacagctgccgccttttttccgacataccggaaatgccagggctcgtactcatatttcgtaatgttctctttgtttttcggataccttaaaataaacccgtattcatgcgcgtgttttgcaagccagatgccttccttctgctcccccatttgctgtgtgaggagaaaatgggcggtctggcttgtgatgtcgacggcaagaccggtctgatgttcgctcgaccccgggatggcaaccgcctgttctgcatgttcttcccccgaacttttcacttctgccgcatatacggctttctggcggttgtacgaccggtatgcggaagcggcatataattcaatgccgtccttttcggcggcggcaaacattttttcaagcgccgcggcagcttctttccgcatatagcttttttcgattctttcgtcgccaaaagaaaagcggacatttggccggacgaggtctttcggtttgtaatccccgagaatataggttttattgacaagtgccaaaatattgtccggattctggatcacttttttcccgttaaccgttttgattttgttaaaatattttgcatcaagcaccaaaccggaaccggtttttttcgcggtatccgtgtggaccggtttcgccggcgcggtacttttatgggcgcccgtttccggctcgtttccgtttgttacactgcagccggccaaaaaaatcgcggcaaggccggtatatacatattttctcatgttgtcacctttctctatcctaaaaaatttgtgcttttgatccttctacggtgccgcgttcactgcggcatgggcttctgttccaaaatggatgctgcttccccattctgcagccggtactgcaaaagaagcggcatggatgccccatccggatctttctgcggcgggaaaaccgggcacattcccgttaagcgcacaaccgtccgcatcccgctcttttgccaaaaaaaatcgcaggtttctccccctgcgatttctctttttttattttaaggcaaattcaaagggacatcaagtgccatttcgtgcaggaccgaaaaaagactgtcccggataccgatgctgcacctttccccatacgtcctgcaaacaggatcgccttacatggaatcgtcttcatattcttcgtctataatgctttttgcaagcaagtattcaaaagtaatatcggcaatttcgtccagttcttcttcacggggcgcaaatccccttttcacgagctctttaaaaaagaatgcggcgatttcttctgtatcaatataaacatccatattttccattaaaaacgcccccttttttcatcccgcagacaccccgcgtttcgttctgtttgttgatataaatatgaccccgtacggcctgatatgccaaacccggcaaactaatccgggccgccgtgcgccgcaagaacccggatttgcattttgaccgcctcaagcatggccctgtacgcctcatcgccaaacagatttaacagcagcgcataatcattgtacatatcgagcagtcggtcgattttttcctgcgttttcaagtcggaagtgacaagctggtacagggggctgcttttcatcgggtaaaaaaattgataacggctgacaaacgaatcggcctgcccggcatcggcgatcaacaacagttcgtcttcatccgcttcaagccattcgccctttggaatgctgaccatttcatagatgacatcttcccatgcatcttctgcataccgccaaatctccgtgcggaaaccggcaattttaaaaaggacgccgccgtagccttttacttttacaatatccccgataaaaaatttcaattctatattgacttcttctttcttgtacaggatcccgtcatattcttccagacgggcgaggctttgttcggcaaggaggccttcccggccgttgaccacatagaaataccctccttccagctgtctgacagccgtaatttttcccaccgttccgtatacttttacgacaactgtatctccaatttgaaacttcggcgcttttgcatccatttttcatgctccttgaaaacgaaacacgttttacttcattctatgcatgcggcccggaaaaagcgaacagcacaatttgcggccggttatttgctttcgcctttataaatctcccatgcccggtcaaaaaccgacattgacgggatataattcccgtttaattcgagataggaactgatttcatgataattggctgaatgcttcggaaagctgtgatcattgtatgccccgttggcaaaaaccgtcaactcgtcacggagatgcggatccctgtatctcattaaaaactggtaaaaagatttcattggtatcccccaaaatgatttttactccaatatagccgatccgctcccccgcgtaaagtacggagggcggcattacgggaagagggaatttttacaaaaaactagaaaaagatagaaaacatgtttaaaatataaatgatgatttgcggttcacagggtaaaaaggaggggcttttgattgaataaaaagaagattttttcaaagagaagacaaaaaagcgagaaacggaaaaattcccgtccgaaccgccagctgcatcggcttgccctttattatgtgcagacgatcagggggaaaattgtgatttcattcggggttttaaccgccttgctcattgtattaaccgtcacttcatacataaacatgcgcgagctggagaatgaaatcaatcatgtcgtccagcatgatctcgccgtacacgatcgtgtccaaagcctgctcaatcagaccggcgaaatcgaaacgggcgccctgaactacgccatttccggaaaggaaggtgctttgcggccgtatgaccaggggaaacaggaagcaagcagcatgttaagccgcttgcaaaaaatgctgaaagataaccggttgcagagcaaaaaactcgaaaaaatttcagaagcctataatttctgggtgggcacggttgaccgggttgtcgaagcaagacagtacggatcggaacaagaagcggttgcacaagtgaaagattcccaggcatccggctatatgaaaaatttgaaaagcagcatcaatgatttactcgcaagcaccacacaagcatcggaaagccggatcggcgaattgcatcgttccgtcctgattgcgcggatcgcaaccgtcaccctttccttgcttgcaatcgttctggccgtcattctcagcatcagcctgacgaaaaacatcaaatcgagcacgagaaaaatcagccggtcgattttggggatcgcaaatgccggcggggatttgacaaggcggattgaagtgtcgtccaatgacgaactggcaaaactggcaaaagatacaaaccagctgatagacggcattgcccggcttgtaaaagaagtatccgcaatggcggaaagtgtctccgcctcaagcgaagaactgctcgcttcatcggaagaaacatcgaaaacgatccactcaattgcggaaacagccaatgaaatcgcggcagacagcgaacaaacttctgccaagatggatacatccttatcaaaaatgaagtcgcttgaagaagtggtcgatacgcttttccggcaggcggaaacagtaaaacaggcttcgctccatatgaaagaatccgcagaaaaaggcagccggtccatcatggaaacgtccggcaaaatgaagagcattgaagcgatcatgacgaatacgagcaaaacggtagaagcgctcggcgaaaaatcggatgatattacgaagatcattatgacgatcaccgggattgccaaacaaaccaatttgcttgcattaaacgcggcaatcgaggcagccagggccggggagcacgggcgcggctttgccgttgttgcagatgaggtcagaaaactggccgaacaatcccagtccgccgcccaggaagtcacaaatattgtgcgtgcgatccaaaaagaaatcagcaccattatcggccaaaatcaggaaggcgtagaagcggttgcttgcggcgtgcaaatttccaatgaaacaatgcactcgctcgaagtcattcaaaaacaaacgaatgaaacgacaaatgtcattattgatatggccgcccaaatggaaaaaacgcagaaacttgctgtcgatgtcgccggttcgttcgatgccgtcagcaaaattgccatgaataccgcggcaaatacggaaatgaccgcggcaagtaccgaagaagggtctgcatcgatggaagaagtcacagccgcagcctcggagttgtcaaaacaagcagaaaacctgcgcaagctgatcggaaactttaaaatataaatgacacacgaaaaagcccgagcatggcccgggctttttccgctttttaattagggccgatccagcatgcgccgataatgatcagcaaaataaacagcacaacaattaaagcaaagccgtttctgtgccctgcatagccccagccgtaaccggaaccgtatccataaccgtatccgtagccgcagcaggagtcatatgcagggtaagcaccttcatggccgtaatacatcccattcactcctcaaaaaaactgtttttctgtacagtgcatcgtatgggatacgggcccgttttgtatgtgcatccgcccagtcggcttattctttttcttcaaagagcgcaagatactccccatatccttcttcctcaagcttttctttcggaataaaacgcatcgcggctgaattcatgcagtaccggagatgcgtggggcccgggccgtccggaaacacgtggcccaaatgcgcgtcagacgccttgctcctcacttccgtacggatcatgccatggctcgtatcaagctgttcgttgagttcactggcatcgatcggctttgtaaaactcggccagccgcagcctgcgtcatatttatcttttgaactgaacaacggttttccggaaataacatcgacataaatgccgtcgcggaactcgttccagtattcattttgaaacggcggttccgttccgtttttccgcgtcacttcatattgtaaaggggtcaattcttcatccttcatgttcatccctccaatggttgcttaaataagcggccctgcctgaaccttgccggtaagcttcgtaatgggccgggtttttccggtaatagtcctggtggtaactttccgccggataaaaggcggaagccggttcaattgtgacagcaatcggctttttaaaccgcccgctctcttccagccgtttttttgaagcttccgccgcctgccgctgggcttcgttccgatagaaaataaccggccggtaagaggcccccctgtcgtaaaactgcccgcctgcatctgtcgggtcaatttgccgccaataaatgtcaagcagcttttcataagggaaaatttccggatcaaacgtaatttcaacagcttctgtatgcccggtcgcaccggagcacacttcctcatatgtcgggtttggttttgttccgcccgtgtacccggaaacgactttttgaatgccgggcaactggtcaaaaggatggaccatacaccagaagcatccgccggcaaaaatcgcggtttcctctgccatgcggctcccccctttatcatagattattttttattttacctgttggtgttgttttcatccagtttcgtgactgcaatcccataattcattataatggatcatagtggcgattttaacggaaaggggtctcataattggaattacctgaaacttttatggaaaagatggggcagctgctcggaaaggaagccgctgattttttccgttcctatgaggaaccgcgggcatccggattgcgcctgaatccggcaaaaatcagcgaaacggaatggcatgcgcacaaccctttccaattggaaaaaattccttttgcctccggttattattttgatgaggaaaaagacaagcctggaaaacacccgtaccatgccgccgggctctattatatccaggagccgagcgcgatgtttatcgccgggcagctcgggcttgaaaaaggcgataaagtgcttgatttatgcgccgcgccgggcggcaaatcgacgcaaattgcatccggaatcggcgagaacggatttctgcttgcaaatgaaatccatccgaagcgggcgcgcgcgctttctgaaaatatcgaacggcttgggttctccaataccgttgtaacaaacgaaacgccagaaaaactaagccggcatttcgaaaactatttcgataaaattttggttgacgccccctgctcgggggaaggcatgttcagaaaagatcccgaagcagcgcgtctctggagccaggaacatgtcgaagcgtgcgcggcaaaacagcgcgcgattttggagcacgcctggaagatgttaaagcccggaggcacccttgtttattcgacctgcaccttttctccggaagaaaacgaacagacgattgaagcttttttggcgcggcatgaagacatggcactggtgccgattccccatgaacacggcgtcggaccgggaaagccggaatgggcaacggaaaagcgtaaagatttgtccaatacggcgcgtttatggccgcaccgcttaaaaggcgaaggccattttgccgcaaaaatgcgcaaacacccgggggaagcggggcaaacggctccgcctgaaaagacaacaaagctttcaaagcaacaggaaaaagactggacaacctttgcagaaaacaccctccagcactttgatcccggcaggcgctccttttttctgtataaaaacgagcttttcctgctgccttttaactgcccgcagttaaaagggctccgccttgtccggtgcggtctgcatctcggcgcttttaaaaaaaaccggtttgaaccgaatcacgcgctcgcgctttccctgaaagccggacaatgcaaacaccggacagacctcggcgccggaagcagcgaatgcatccgctatttaaaaggggaaaccctccccggaacaaaggagaaccgcggctgggtccttatcacggtggacggttttccgctcggctggagcaaagaagtgggcggcattctgaaaaacttttatccgaaagggttaagaatcgtttaaacctatgtaacgttaacaggcggcgaaaccttccggcatattgaaaagccggcttttaaaggccggcttttttcgttattttggaaaaccaagtgtaaacgagatgtcatcatgctgcaaatcaaattggttgactttcactttggcgccgttttccagcttcatattttgcagctggacatacaccagtttttcgcccggctggatgatcacccacctgggcagatggtaagtcgttttgacgaattttaaaatataggataccgggagatggacggaaccgagggataccgatttttgctttaaaacgagatccccgttctttaacgctttcggcttaaaagtcatcttatactgcattttttcggaaaagaccccgacagttccatagtagacgacttcatcatttaaaaacactttcccctttattttttcttcccgcaaatagcggttaatgagcgccgttaaatccgccttgtttgtctctacccgcaaatcaaccgtttttccggttttttccggttccggcacgcggccatccggcacaaaaagaaaaaaggaaagcacaagtacaaaggccacaaccactgaagccagtgcaaaaaaagcgattttccatgggtttcttttcacgcaagcatcattcctttaccattttgctattttggaatccccaaaaaattccctttcaggagataccggtaaatccgtttcgacatccgtttatacccttcatcgttcggatggaaatgatcgtcataaagcaatgcatcttcgttattctcaaaaatatccgcaaccgggataaaaacggtatttttatagcgagatgccaccgctttgccggcattattccaggctgcaagcatttggtccatttcctttatatcggtcagccactttgaaaaagggttatagagaccgacgagcgcgatctttgcatccggattgaccgcgcggacgcggcggaaaatttgatcgagccgttgtttgtaccccggaatggccgcctcaaattcctgcttgtttaagttggaaatattttcacgaaacactttcatcatatcattgccgccgatggtaataataacaacatctgaatccttgatggacttccggattttttcattctggagccgggcaagcaattggtcggtcctgttcccttttacgccataattggcaatggtggtttttttcacaccctttaaggcgtctagttcatttttcaaataataggtgtagccgccgcgccccttgctgtcgcctacgccttcagtcagggagtccccgatcgagacgatgtgcagcggaacgggcaccatctttttttcattgcttgccgatttaaacaacaggccggttatgccgtgtgaacagcccgataaggcaagcgcaacggagatgagaagaggaatgaaccattttttcatttttgacaccacttttcaagcctttctgaatttacaatgtacccattataacatgaaaaacgggatcttctgctgatttacgcataaaattgcacccgcttaaagcgcaagatgtttccattgcagattggcccgccaaacactataataaagagaagcccaaagacaaaggtggtttaaatttttgacaacttcaacactgctttcatcctggaaacaggaactggccaatgccgttacgcatggcatcggttttctgctcagcattccggcgatggtcgtgctcgtcgttttcgccgcagaaaagaataacccgctctatctggcaagttttctcgttttcgggatttccatgctgcttctgtatttgttttccacactgctgcacagcttttactggacgaaagtgaaaacatttctcgccattctggaccattctgccatttacctgttaattgcaggaacctatacgccgattgtgctgattacgctgcatggcactttgggatgggtgctgttttcggtcgtgtggggagtgtctgctattggcattgctggaaaatgttttctcattcaccgtcttaaattattgtccacgatgctttacttagtcatgggttggctgatcctcattgcaattgagcctttgtataaagggctttcagctccgggattctggctccttttttcaggcgggatctgctactcggtaggcgccgtgttctacacatggaaaaatcttccttactcccatgcgatctggcatatttttgtcattgccggcagtgcatttatgtacttcactattttattttatgtctgatggcacatagaaaaaccatgggaatgtttccatggttttttttaccttttccgtacaaatacttgaaattcgtagtcataaggatttttttcgttttttatcccctttgtgctggaagccatttcccacttctcccagtcaacgggcggaaaataggtatcgccttccatgtcagcgtgtattttcgtccggtacaatttttccgcttcctcgagcagcagggcaaaaatctccgcgccgccggtgacaaaaatctcgccgccatgtgcatccgcccattttaacaattctgttttgccggcgacaatgacgcagtcttccacttgaaaatccgggtctctcgtcatcacaatattcgttctgccgggaagcggctttccgatcgattcaaacgtccgcctccccatgacgaccggatggcccattgttacatttttaaaatacttcagatcttcgggaagatgccacggaagcgcgttgttctttccgattacgcctttttcatcttccgcccataaaaaggaaatcatacactcaccctccccggaatgtgcggatacggattgtaatcttttaatgtaaaatcttcgtaccggaaggagaaaatgtcttttacttcaggattcaaaaccattttcggcagcttgcggggctcccgttccagctgcagcttcacttgttcgatatggttcaagtaaatatgggcatcgccaagcgtatggacaaaatcccctggttccagacccgtgacttgcgcaatcatcatcgtaagcagcgcgtaagaagcaatgttaaacggtacgccgaggaaaatatcggccgaacgctggtacagctggcatgacagcttgccgtttgccacatagaactggaaaaagcaatggcacggcggcagggccatcctgtcaatctccccgacattccaagcgttaacgatcaggcgcctggaatccggattggttttaatttgttcaatgacctgggtgatctggtcaattgtccgcccgtcccgggtttgccatgaacgccattgttgcccgtaaaccgggccgaggtcgccgttttcatctgcccactcattccaaatgcggacgccgttttcctggaggtattttacattcgtatctcctttcagcatccagagcagttcataaataatcgatttcaaatgcagtttctttgttgtcagaagcgggaaaccgtcctgcaaatgaaaccgcatttgatggccgaaaacgctgatcgttccggtaccggtccgatcatcttttttgacgccgttttcgagcacttcgcggcaaagatccaaatattgtttcatcatgattccatcctttgtcattcaaatatccgggtttctatcccgaaaaattgcgctgtagaatatgaacctcggggcaaagcgatccatttgcatgattattctttgttgcagccggcaacaaagcagccatgtttcgctcattttatatccttctgctggtactgcattcactgcgtttgcaaaaagcacatgaaatatccggctggaggttggggttgcccgtcttccaccctgctttagccttttatccgttaaggcgttgtttgtttacagctgccgccgcggcaggcattcatcccgcctttaccctttcatccattgcggcggcatgtttttgccccagtaaatggtgccaagatggcggtgcgtttggaaatggtcaaaggccacatggtaatggaaattaaaatagtagccgtcgccgggcggatggtcgcgccggacatggaaacggataatgtctttatttgtttccgtattgtatatatgaaacattttttcaccggttcccgcactcggctggtctgaaacagcgagcagcggcagtttgtcctgcgggtattcctgcagcatttccgcgatggcggtttgaatatttggcaaaacggcagcacggaactcgtcttcaataacaggcctgatcctttccccaaatttcagataagcccgtttttctgcatcttcaacgaacgaccgggcaagcgcggcacggtcaattttgcggcttgtggcagccgtccggttggaataagcagcagtcgtttccgccgtttcatttcctgttttataaagatgattccagatgacatgggaaggggggacaaggccgaatgttaaaacagaaacaaggatgaccattgattttttcagccagtttttcacgcgatcccctccatatcccgacagtttgaatatgtatttattatataatatttacacagaaaaaacaggccccattttgcacccggaatgatgcaaacggggccgctattttacgcgcagtattggtcaaaagcggcatgcagattttcgatgatttcttcgacttcatgcccttcgatatcgctcctcgggataaaatgggctacttcttttccttgaagaagcgctacggaaggggaggatggttcgatgccggtaaaatattcacgcatttttgtcgttgcttctttgtcctgaccggcaaataccgtgacaagatggtctggcttcttttcagccgtccggatcgcttcgacaattgccggacgcgcaagcccggctgcgcagccgcaaaccgaattcacgacaaccagcgtggtgccttccgctttttccatataggcctcgacttcttccggtgtgcgcagttccgtaaacccgtttgccgtcaattcttccctcatcggggtaataagcgcccgcatgtattcttcatatgccattgacatgttgatgtcctcctttaattatggctggatttgccttgcttctgtcatctgcttccagaccgagccttttgcttcttcaccctttgtaatccgctcaatcgccattctgacctggagcctgacttcaaattcagggtcgttttccgcttcccttaaggccgggagagaagcctcgtcgcccgcttcgtataaaaacatggcggcgcgccacctgacaattttgcttttatctttaagcgcttttgccatttccccgcatgcctctttgaacccgaggtcgctaaggcagtcgcctgccgtccgccgcacgcttgcattcggatcgtgcaggccgcggtataatagcggcagcacccgcttgtctttcaccatgcccaaataaacaacggcaagccgcctgatcgatggtttttcatcttccagggctttctccaggacaggcaggtcggaaagatcagggtcttccatttgttcaaggagccggtaccttttgcgccagtcatccgtttccagcatgccgggcgttaatttcagcctttttttggcggcttgaacctgctccggatgctgcgcttcattgacaagccggtttagcctttctttcggataagcggcaatgatttcttctgtgacttccgcaccgatttcttgcatctccccgtaccgaacgccgaagtctttccattttcgcaagaaaacataattgtcgccttccaattgcgcagcggcaagcgcctcggcaaaataagccggcagcccgaaacgtttttcctgttccccgtccgccagtttaacctggagcggaatgcctttaaacatctggacaaacacctggacttccccgaaatgctcattggcacgggggctgtttccggtttctgcttccgcttccccgaacacctcacgcactttcggcagaatgtcctgccagtctgttttgccatgccgctccaccgcgagaaagtccgcaacatggtatacgcctttcacgccttcgatatcgaggatacggcggatcagcggcggcacgccttcttcctgccctttcttataattgctgcgggcgccgtccgacagtgcttccgtcaatacgactttcatcgtattcgggctcggcgttggttcaatcgctttaattttcatctccacaccgcctttcccatcaagtctacttgcattttaacataatcacagtggatacacgaatgagttgattcttttcataaatatcaagcgtaccttgaaaatcagaaacatctttcgtgcgttcgccggcgcaacattttttcctttcaaaaaacttccggctgccgcccattccttcccgtagcccggaaagcggcgagacatgctacacttccgggcaaaacaggactccttccccaaaaatgtttacttgtcttttccttcctgcagctcggaaagatagctccaacgttcaatgaggccttccagccgaccgttttcttcctcgagcgcttttgaaatgtccagggccctgacaaaatcggagccggcttgttccaattgttcgttcagtgcggcaatggcttgctcgcacgcttcaatcttttcgtctatttcttcccattcccgctgctcgtggtaagacaattttttccgtttcggttcccgtttaggcttcggcacatccattttttcctcctgtgccggcgtttcatgcgcgatttcgaggtagtcgctgtaacggccgaaaaagcggctgattttgccgccgccttcaaaaatgagcagctgctccgcagttttatcaagaaaatagcggtcgtgtgaaaccgagatgacgacgcccggaaactcaccaatataatcttcaagcacggtaagcgtctccgtatcgagatcattcgtcggttcgtccaaaagcaggacattcggccgcgacattaggagcctgagcaaatacagcctgcgcttttcgccgcccgacagtttcctgaccggggtgccgtgcgtgtgcatgccaaaaagaaatctttccagcatttgcgcggcggaaatcgtttccccgtcttttgttgtcaccgtctcccccgcttcccgtatatattcgatcatccgcttattttcatccatgcctggtgtttcctggcggtaatacgcgatcttgacggtctgcccggtgaggcgttccccggaatcaagcggaatcctgcctgcgagaatgttcatcaaagtggattttccgcttccgtttttcccgacgatgccgatccggtcacccggctttacgagcaaattgaaatcctttaaaatcgtctccgatccgaacgccttattcgcatgctgcagttcaaaaacctgtttgccaaggcggcttccggacaaagcgatatcggcttcctgctgccgggggcttttactgaggctggattccagttcttcaaaacggccgatccttgctttttgttttgtcgaacgcgcctttgccccgcgcttcatccaggcaagttcccgcctgtacaaatttttccgtttttcctcctgctgcagttgcgcttcttcccgccgtgcttttgcttcaataaaatcctggtaattccctatgtaactgtacagttttccgccgctcagctcgaaaatccggtttgccgcccggtcgagaaaatagcggtcatgcgtcacgaacaggacagaacggggatattttgcaataaactcttccagccacttgacagccggataatcgagatggttggtcggttcatccaaaatcaacaaatcgggtgtttccattaatacccgggcaagggcgacccgttttttctgcccgcctgacaatcccgaaatttttctgttcaaatcgcggatgccgagtttggaaaggaccgtctgcgcattggcgccggcttcccatgcaccggcggcatccatttctttttgcagccggaacaatcgatcctgtttgcctgcatttcccggatccttcccgacttcaagcagcgcctcttcataggaacgcaaaagcgccataaccggggacccgctattatacacctgttcaagaaccgtaaaggccggatccagttcaggctcctgcggcaaataaccaatggtataatcgttcggcgcgctcagttccccgctatccgcttcgtcctgtcccgcgatgattttgagcaggctcgattttccggtgccgttgacgccgacaaggccgatccgttcctgttcgccgatatggaaagaaagattgtcaaacagcactttttccccgtaagattttgtcaacccttgggcttgaaatattttcataattcaacatccattctttgaaaaattgccgtcaaaactgaagaagcggcgttctcctgcaaagataatcccgcataagtgttcccttctttgccattttatcatgtttttggacaaggaaagccaaaagctgcacggcggggcgtgcagcttttgttagaacctcatccggcgcaaagtcttcacggcatctgcgggcatctcaaacaaatcatccattaaatcttccgttatcagccgggcaaaatcgatggcaacttcttcggttacacccgagcgtgatgaatgaacagtcctttcctcgatgcggcgccggttgccgtttccccatgcggaaaggatcatctgtttataatcagcggaccggccactgtttttccaggaaaaagttacggcggcactggcacccgctttggcgccgggcgcgggatccagtatttccgccgccagctgcccgagcgaagccgaaagacagatcatcacgcttgcttcctgccattccggaagctgaagcgtaatgcggtattcccgggacatttccgccaggtcgaccaggtcttttcttccggtgatggatgcttcccctcttaaatcaagatcataggcagcgccttcgaatacagtcttcatattttcaaaagcagtcgggtcaaacatcgcctgtcccccgtttaaaagagcccggatgcgcggccttccgcatcaacatccatccggtaagcggccggttctttcggaaggcccggcatggtcagaacgtctcctgtcagggcaacaataaacccggcgccaagcttcggaacgagttcgcggacatggatcgcaaaatcatgcgggcggcccgttttgtgcgggtcatcggataaggaatactgcgtttttgcaatgcaaacagggagatgcccccatccgagctgttcaaattcgcggatttgtttttgcgctttcgcggaaaattcggcgccgcggccgccatacacctggcgcacaatcgcctctatcttttcttcaatggttgattcaagcgggtaaaccggcctgaatgtatgcggctgtttggcggcttccagcagtttggccgcaagatccatgccgcctgcgccccctttttcccacacttccgtaagcgacacgggaatgccgcgttcactgcaccaatgttctaagacagcgatttccgcattgctgtccgatataaaccggttgatggcaaccacaaacggcaaaccgaatgaagcgatcgtttcaacatgtttttgcaggtttaaaagcccggcttcaagagccgcaatattttctgccgccaaatcttccttgcgcaccccgccgtgcattttcaaggctcggatggtggcgacaatcacgacgccgtccggtttcaggccggccgcccgcgctttaatgtcgagaaatttttcagcgccgaggtcggcaccaaagccggcttccgtgacgacataatcggccagtttcaaagcggttttggtcgccataacactgttgcagccgtgcgcaatattggcaaacgggccgccgtggacaagggccggcgtatgttcgatcgtctggacaagattcggtttcaaggcatctttcagcaataaagcaatcgcgccttcgatcccgaggtcaccgacggttacgggtttcttttcgtaattgtaggctacaacgatgttcgcaatccgcctttttaaatcttcgagatcttccgccaggcataaaacggccatcagttcagaagccacggtaatgtcaaatccgtcttcacggggcacgccctggccgggaccgccgaggccgacgacgacatggcgcagcgcccggtcatttaaatcgaccgcccgcttccagacaatgcggcgtgggtcaatctgcaatggatttccctggtggatatggttgtccagcaaagcagaaatggcattattggcagcggtaatcgcatgaaaatcgcctgtgaaatgaagattgatctcttccatcggcaagacttgtgcataaccgccgcccgttgcgccccctttcagccccatgaccggcccgagcgatggctcccttaaggcaatcatggttttatggcccagctgttttaatgcatcgccgagcccgatggtgacggttgacttgccttcccccgccggcgtcggattgatggaagtgacaagaaataattttccgtcttttttggtttggagctgcttgattttttcatatgtaattttcgccttgtatttcccgtaatattccaggtcttcttctgcaagctgcacggtttccgcaatttccttgaccggtttcagcgaagcatgctgcgcgatatcaatatcagtctttccaatcgaatggcttggcaatgtcaaatcctccgcttcatcaaaaatctgcttccatcttctattctacatacccctgcagcccaatgcacctgaaaaaagcatttttcgcccgcaccgggaaatcgtttggctttatccctgattttctacatgaaggctgccatgcggattttgtcttccggctggcggggaaaagccctgcttgcatcatgcagggaggacactaaaatcctgatgcgtgccggcagacaggcttccaggcacctatgccccatcatccggcaacagccgacgcataaaaggaatcagccccatttcatgggcaggcaggccggaaaattcaatcctcgttttgtgcctgcagccggttcaggtcgtccacccggcccggatcttcctcaaagtactggacaaggtctccgatccggtcaatggaattccagctcaggtgatgttcaatcccttctacatctctataaatattttcttcgtcgaccccgatgatccttaaaaactgttcaagcaaatgatggcggtcgacaagccgttttccaattttcttgccttttggggtgaggaccagtccgcggtatttttcataaacaagataatcatccttatccagcttctgtaccattttcgtaacggatgaaggatgaacggaaagcgcttcggcaatatccgaaacacgcgcatatcctttgctttcaatcagaataaaaatctgttcaatgtagtcttccatactaggtgtcggcatccacgggcccccattcttacaacaaatattgagtctgccggtacaataccatcagtttactataatcacggatgatgtacaagaattcataataaatgtgcgccgattttaaaccgcttgcaaatttaagaattcacaacaattttccatcatttttgcttcctttgtcttgactatccataccggttggagtatattaattataacattaaacaagtgatttcccagaccttgatggcggtttttcagttctgaagagtaaatttttttactcctcagagctggcggtttttcatctgtttaatgcaacattttttggcacgaacgtgcttttgatttaggaggattaagaaatgcaaaacggtaaagtaaaatggttcaataacgaaaaaggctacggattcattgaagttgagggcggagacgatgttttcgttcatttcaccgctattcaaggtgaagggttcaaaactttggaagaaggccaggctgtttctttcgacatcgttgaaggcaaccgcggacctcaggcagcgaatgtaacaaaactttcataaatcatagaatgcaaccaggctggcttttatgccagccttttatttttgtgcaaaccgccacaataccgggttccccattttccctcgtttttgcatcactaggcatgctgtttgcagcccgatggcaatcatcagccgcctgtttcccgggacggcattgttgcggtttaataccggcaagacgaacagctttcgggtgccgcctgtttcctgggacggcattgttgcggttgtgaaaaccgtcatgataaccggtcgccgtattttttcagctgttcgcctaccgtgcattgccggatgcaaaactggtgggcatattttttcccgcgtgttttccggaaatgcgattttaaaaaacagccttcacaatacgtctttaatattttatccacttcccggatgagttgttttctttccatttttatcccttctttctctccgctagctttcccatccgcattgcgcgtgcatttattccattggatacgccgggtttgcccggggatcatccctttatcaaaatttcccccgaattggggcatgctataacaaggggtgatcaggatggctaaaaaagacaatacaaaccgcggcaaagcggcaaattccgttacgacgcaaggaattgcacaggatgcggcattcgcgccggatccaaagacaacccttgaaaaccgcgcgaaaaaatccaatacaaaaatctgacaatcgcaaaacggagaagaaaaacagcattcttatcctgaatgctgtttttccactttccgtgccgtttaaaccgggcaaagcggttaagaaatgaagcttgcgtttatccgggctgtaaccaaatggcgttttaccatttttaattccagttcttccatcagttccataaacgtttccggaatctggccaaaccgcgctttttccaaagaaaaagccaccggcacatcacaacggatttcggcaagttttctgctcagatgtagcatctccagccccgcttcgatttttttctgctgcgacggcgtgagctccccgagatgctccaaaatgccgctgaggtttccataccggctgacgagcttaaacgctgttttttcaccgatccccttcacgcccggatacccgtcgcttgcatcgcccatcagcgcttttacatcgatgaactgccgcggcgtcaccccgtattcgtccataaatgccgcttttgtataggttttataatttccgaaccctttctggaggagatggacttccacatggtcatccaaaagctgcaaaatgtcgcggtcgccggtcaaaatggaaatatccgcctcgtctttgaaccggcagctaagggtgccgagacagtcgtccgcttcatacccggccactccgacatttggaatttcaaaagcttccactgtttctttcgccagaccaaattgcggaatcatctcaaccggcgggacgtcccggtttgctttatattcaccgtacaagtcgttgcggaacgttttgctccccatatcccagcaaacggccacatgcgtcggttttttgttctcagccgccaaaagcaaatggcgcaaaaagccctgcacgccgtttgtcggcattcctttggaattcaccataaactgccccgtcacggcggtggcataaaacgcccggaaaagaagcgccatcccgtcaattaaaagcaaatgcggcctcttattcatgcgatcacctcatcaaatatcatcctgttattataacacaaccggcaaaccggccgcattagaaaaaggcgtccctgcacgggcggaacatggtgcccggttaacatccagccggccgtggatcaaagtagggaaaaattcaattgggatcgacaaggttttcttcaatcagccggtcgagcgcgagcaggacggccattttgacatgcgcatacgtaaggccgccctgaacataggcggtgtaaggcgggcggagcgggccgtcggcggaaagctcgatgcttgccccctggataaatgtgccggctgccatgatgacatcgtccgcataaccgggcatatcactcggatatggcgtcacataagaattcaccggtgaagcaaactggatcgcctggcaaaaagcgaccatgctgtccgggtcgccaaattcaacggactggataaggtccgtcctgggcgcatcccatttcggataagtatgcatcccggatttttccaggattgccgatgtaaacaccgcaccttttaatgcctctgccacaacatgcggcgccagaaagaagccctggtacatctcaagaaggctgtaaagcgatgctcctgcttccgcgccgattccgggggatgtcatcctgtaagcgcagctttccacccattttttcttcccgcaaatgtagccgcctgttttagcaagcccgccacccggatttttgataagcgaaccggccattaaatccgcgccaacatggcacggctccttctcctctacaaattcgccgtagcagttgtcgacaaacacaactgtatccggcttgatttcttttacaaagcggatcatttccccgatctcatccactgtaaacgaaggccttgacgcatacccttttgagcgctggatcgcaaccatttttgtatggggatggatcgcttttctcaccgcttcaaaatcgactgtgccatcttcctttaagtttacataattgtacgttatgttaaactcctgcagcgaaccgttgccgctgccgtgcgcccctgtaatttcatcaagcgtatcgtacggcttcccggttatgtataacaattcatcccccgggcggaggacgccgaaaagcgcaatcgtaatcgcatgtgtcccggaaatgatttgcgggcggacaagcccagcttccgcgccgaaaacatcggcatatatgcgctcaagcgtttccctgcctgtgtcatcatagccgtatccggtcgacggataaaaatgcgactcgctcactttatgcttttgaaagctttgcaatacgcggaactggttcgtttccgcccgtttttctattgcactgtggaccgggcggatttggcgctcggcctcctctgccatttgcctgagtttggcaccgtgagtcaaatactggtacatcttctacacctttccgttcaaaatgtcgggtgcatgcaacaagggaacccgctgtatgcacccgcgcacaaggtttttattcagcatatggttgtaacgcccccaaaactggatggcccggaagcgcatatcccttgcactggtatgcctcattttcttccttgaaaatcagttctcttaaaatggtatcactttttaaaaccgaaagcagctttccttccgtttgcgggacaagcgcgctgtacggcaccatttcggccagcacctgtttttcaatttccaacagcagccggtggatatctttttcgtctttcgcgctgatcatgatgctgttttgtgcattgggcatgaaatggctgtcttttatatccattttattgtaaatggcaagctgcggcagatggttcatttccagttcggaaagcaggcgctgcaccgttttttgatggttgtcataatccgggttggaactgtcaatgacatgcaaaagcaaatcggcttcccgcacttcttccaaggtcgagcggaacgccgcaatcagcgtcgtcggcaagtcctggataaatccgaccgtatccgtcagcaaagccgtgtaaccgcttggcagcacaacttttcttgtcatcggatcaagcgtggcaaacagctggttttcttcataagaatctgcggcagacaggcggttaaacaatgtcgattttccggcgttggtatagccgacaagcgcaatttgaaacacatggttctttttccgcctttcgcggtaacgctcccggtggcggacaaccgtttcaagctgcgccttaatttcagaaatgcggcggcggatatggcggcggtccgtttcaagctgggtttcccccggccccctcgtaccgattccgccaccgagccgtgacagctccgtaccgcgcccgccaagacgcggcagcaaatactcaagctgcgccagttccacctggagcttcccttcttttgagcgggcacgcgtcgcaaaaatatcaaggataagctgtgtcctgtccagcacgcggcaatccactgcagcctggagattgcggagctggctcggcgaaagttccgcgttaaaaacgatcagatcggcttgcaattctgaaacaagcgcctttagttccgccaccttgccttttccgatatacgtggcggcatctgccctgtcccgtttttgtacgacttcaagcaccacttccccctgcgccgtttcgacaagccgcctcagctcttccattgaataagcaaaacggctgtggctgccgccgctcaattcgcatccggcaagaatcgctctttctttattattttccatttcatcacctgttccgtccagtatacctgttatcttaccaaaaaacgcacaaagataacatgtccgggcgccttttttggaaaacagggcatggcttcgtgcgatatggctttttttccgcccgcattaaaaaaggccgggcactgttatgcccgggcccgcatgacttgaaaatgtatccccaagctgcttattttccgggcgaaacagctagccggcaaaaccgtcttaagctttcggacggaaaataagcgcctgcggaaaaccgcagagggcgcaggggcgtcagtccggaaaaacaaggtcactgctacgcagcgtgaccagctcatggcggtcatagcaagcctgcatcaacagccgcatcgcctgggcgcgcactgatttttcaattacattccgcacataccggccgtttgaaaaactggcagggttgctcgttgttttgacaaaagccagatggtcgcggagcttccgttctgcatccaaactgagcgtatactctttttcagtcagcatccttttcccgatatccatgagctcctctaccgagtaatcgggaaagttgaacacaatcgggaaccgggaatgcagccccggattcaggctcaggaaataatccatttcgtttgaatagccggccaaaattaaaataaattcgtgctgtttgtcttccatatgctttacaagcgtatcgattgcttctttcccgaaatctttctcgccgccgcggccgagagagtacgcttcatcaataaataaaatgccgccgatcgcttttttaatcaaatcccttgtcttttgcgccgtatggccgatgtattcgccgacaagatcggccctttccgcttcaatcaagtggccttttgacaatacattcattttatggaacaatttcccgatcaatcgggcgacagttgttttgcctgtgccgggattgcctttaaacatcatatggagagcctgctttcccgtttttaacccggcggcttcccttttcttgttaatatagatccaggcataaacttcttttaccatttttttgatttcttccattccgacaagcgtgccaagttcatcttcaatttcttttaaaatttcatgttccgctgataaatcttttttgctggtttctattttcggctggggaataacggcctccctttggcccgcatggaggacaatattgatctggccgttatttttcatacgaatcggttgatccatcaccgccacctcgcattctacagacaatatacgcggattgggccgggagtgtgacaaatgcccacgtacaaaaacttgttgttcggcataagaaaaccggttgtttttcaaatccgcaccggccaaaaatcagcatcatccaaaatggcgggggaatttgtcggtttttgcgctttcccgagaaataattatctgtatcagtttatgtttcggggtcggataacagtacaccatatttaaaatgcccggcaagttgccgggcattttgttttaattttcctcaaaattgatttgaacatttttttgcggctggaacgttgaaatcgcatgtttgaaaacgagttgctgtttgccgtctgtttcaatcagcacggtgaagttatcaaagccttttacctggccgcgaagctggaagccgttcatcaaaaagactgtgacaaccgtaccgtctttccgcaattggtttaaatactggtcctgaatattgatggctttgttcattacaaatcctcctctttctctctattttaacctgctcatgactaaagccgcgagattcctgcaaacgccggtggatctccggtgatttttggcaggcagcccccgcagtttctgcggttcggtgcccggagcatctcatgactgaagtcacgcgtgttcccggctatactctatattataaactattcgattttaattgtagctttcctgctatgaaagcggaaatttcttcaaattttttttccttttcttcctcttttgtcatgtcaaaccactctatttccaacttattgcggaaccaggtgagctgccttttggcaaaacgccttgtattttgttttaagcgggaaacagcctcatcaagggtcgtgcgcccgtcaaagtaatcgtacagttctttgtagccgatcgcctggatggactggacaccacgcaaatgtttgtcatacaactttctcgcttcctcgattaaaccgcgttccatcatttgatcgacccgttcgttaatgcattgatacagcttctccctctccatcacaagccccaccagcgccgcacaataaagcggttcatgctgttgctgtttctggtagtcttgcatcgtcctgccggaaaaatggcatacttccagcgcccggatcacccttctcacattatgcggatgaatctttgcggcactttccggatcggttttttccagtaatttgtaaagcaggccgggcccttcccgctttgcgatcttttcaagttccgcgcggtatgccgggtctccggcaatgtccgaaaaacggtaatcgtataagacagattgtatgtaaagccccgtgccgcctacgatcatgggcaacttgccgcgggaagcaatatcgcttattttttcccgtaccagttgctggaattcagcaaccgaaaaagactcatccggatttttaatatcgatcaggtgatggggaaccccttccatttcatcctgcgtaatttttgctgtgccgatatccatgcctctgtatacttgcatcgaatcgccgctgataatttcagcatcgaatcttttcgcgaggcggatgctaagcgccgtttttcctgatgctgtcgggccgatcagtacgatcagtttttgttttgccattcgtaccctaccttttatgctggagattgcagcattctttaaatccccggatttttctgtctctatcgtaccataaaacagcaaacagaacatctatacagtttcccttttttcgggattttattcatcattgaaaattcgcttacaaaaaaatatttaaaaaatgcatataggtctaaagtcctgcttcacatccaatccatttatactatataataaggataatgattatgatccatgtaaggcaggtttttggtatggtcaaaaatgacgagcgtttcttttttattattgaattagggcggcttttggatgaataccacaaatgcccgtataaggctgtgaaaaaaagcatatatgaagatatcgtattgctcaggcatgccattggccctgattcaaatgatatgcctgccggctccgctaaaaggccatcttaagcacaaccgcctccgaaacacgcttatgttgccttttcttcaaaactgtttttctaatcttcttatatttctccgaaagggatgtttgcatggaaaaaatgaatcagtatcccacacttgcctctgcccatctgccccgtattattttgatcctccgcgaacaattgatgcagtgtgccaaacaaaatggcatgaaccacccggaaacgatccgccaaagccaattattggacaaactgatttatgaataccagctgggcatgctcgcacaaagcaagggcggctcattccgtgattaattccttccatccgccatttcctttaaaacaaatgccggccgctgccttttttgcttgccgtagtcatgatggcccgtcaggcgttgcatcctggaagaagtgtactctggcacggcgtttgcaatgaacgaggaaacaaaaggacttctacggcccgtgatatgactgaaagcaatcttcgtcttgcaaaacaaatgagatgcccatgccgcactgaatgcggcaccaccggaagatgagaatcttgcggcgcatattttcaggacagagatgaattcctatggattggattaaaaatgcaatatataatggatggtgatagaaatttaccccgaagaagaagatcatcaaaacaatttggaaggagattgacaatggatcagaagctggatcttatccttaagaagctaagctcactggaatcaggccaaaaagaactgaaccaaaagtttgaagccttagaatcaggccaaaaagaactgaaccaaaagtttgaagccttagaatccggccaaaaagaactgaacaataagtttgaagtcttagaatcgggccaaaaagaactgggacaaattgtcagagccatacgcgaccgccaggaagaaacagatgcaaagattgatgccctatcaatggatgtccaccatgtccacggtgagattgcaggcgtcaaagaggaaatcaaagatcttcggaatggtgtcatttttgtaaatagaaaagttgcagacgcagaattcgaaattaatatgatgaagcaaaataaaaatcagtgaccaaatcgtatatgtaaaggaagttgcccctctgtaaagtcatttgcagatgaaaatcggatgaatgcatggaaacctcagtctatttgatagatatgtattctatattctttaacacgatggtatccaattgctcataccgaagttgttccgtccactacaagaattaggtatatatggaagttataacatctttttcattggtgactatataaaatcatttaagtgaacttggaggagaattatagtgagaaaaatcatttcagtcgcagttgcttccggcctaattttcggagtatcgtttgctgcttctcatgatgttgatgcggcaaaggcaaagacttatgccaactgtaaagccttgaataaagattacaaaggcggcgttgcaagaagtaaaagcgcaaaaaacaaaggtggaaagacacactataagccatacgtttcaaaagcattgtatgacaaaaataaaacaaaagacagggaccatgatagtatcgcttgtgaaagataggaaaaggccctctaggctttttcttagaatcaaagacggaacctatatggcgtgaacagcgattctaaacaaggcgtcatcacaatgaatgacaaaagtcaagaatcagaacaaaaaactgcaccccctctcgtattatccaaagcacttatcgttaacgggctgatgggcctttagtggaagatggtatcgatacgctagtaaaaggttgaacaatacaacgatctcaaacatgtttgaaatgtggtcaaattgtggtcaaacacccgttaaaaagattgaaaccccttgatcatcaaggggtttcgcgatccgggagttacatgacccgtttaaacattttttcgagttcgtataccgaatagtggatgatgatcgggcggccgtgcgggcatgtaaacgggtcggatgccattcggagcgcatcaagcagcgcctggatttcgtcattgcgcaaatgccggttcgccttgatggaccctctgcagctcatcataatcgccgctttttcacgcaatttttttacatcgactttttttatggaaaggacatgctcgatcatttcctcaatgacttctttttcctcatttttcgggaaccatgtcggatgggaacggacaataaagctgttatgcccgaatggttcaaggaaaacgccgacctctttcagcgcttcaaggttctcctgaattttaatcgcttcatccgtcgcgtattccaaagtcagcggcacaagcatttcctgcacctcttttttcacttcgccgactttttcgcggaaaaattcatacttgacccgctcctgggcagcgtgctggtcaatgatatacaggccgttttcattttgtgcaaaaatatacgtgccgtgcatctggccgatcggatacatcggcggaatgcgggatgccggctgctgtgccgccagctgcccctttgcctctttaacatccaatgcagcacgcaccggttcgcggatctcttccggtaaaacgggatccgaatttcctcctgaaaatggcgggaaatcagcggtcggctgttccgcatccgggcttttataaggctgccccgttttcgcttcctccggccggggcgatgggtgcggcgcaaccggcgcagagaaagctttcggggtttccggttccgttttttccggcaaatggtcaagctggaacgacacctgttcctgttttggtttttctgcctgccgcaccatgccggacggaatcaattcctgctttttgaaagcagctttaatcgcgcccgtaatcgcccggcacagttccttttctttgctgaaccgcacttccagcttggccgggtggacattcgcatcgactaacaccggatccattttcagcgatagcagcacaatcgggtagcggccgatcgggagcagtgtatggtacccttccaatatggcttttacaagcgcgtaatttttaataaaccggccatttaccatcgtggaaatataattgcgcgaagcccgcgtaatttccggcaaagcgataaacccgttgatttcaaaatcaagcgtttggctgtgtaccggaatcatttttttggcaatgttcacgccgtaaatggcggcaagcacctggcgcacgtcgccgttcccgcttgtctgaagcagcatctttccgccgtggcggaggcggaaagacacctcgggatggctgagcgcgaggcggttcaccacatcggtaatattgccgagctcggtatggatcgacttcatatattttaaccgcgcaggcgtgttaaaaaataaatcggtgaccgtaatttcggttcctctccggctcggcgcctgttcgcgggccacccatttcccgccttcaatgaccgcttttgtcccgggcccgtttccggttgaggtgaccatctcaacacgggcaacagccgcaatgctcggcagcgcttcgccgcggaatccgagcgaacggatccggaacagatcatgttcgtttttaattttgcttgtggcgtggcgtgagaaagcaagctcaacatcttcaggctcgatgccggttccattatcaatcatacggattttttccattccggcttcccagacatcaatttcgatgaccgtgctttccgcgtcaatggcattttccgccagttccttcacgacagatgccggccgttcaaccacttcaccggctgcaatcctgttcgaaagcgactcgtccagttgtgcaatttttcccatcgcggacaacaccacctatttttttaattttttctggatttcatagagtgcattcatggccgcaagcggcgtcatctcaagcagatcgagttccctgatttgcttgagcacctttctttcctttgcttcaacggttttctggcgcggcgtttctggctcttcaaaaaaggacagttgcgcgggttcgctggtagcagccgcttccggggggttcatttgcgtctcgccattatcctggttttcaagcgcatggaggattttttcggcgcgacgaatgacttgttccggcaggccggccagttttgccacatggatcccgtaacttttatctgcagggccttctttgattttatggaggaaaacaactttgccgttttgctccatggcggtgacatggatgttttgcagcttgcccagatctgcagaaagcgccgtcagctcatgataatgggtggaaaaaagcgttttggccccgatttcatcatggatgtattcgatcatcgcctgggcaagtgccatcccgtcatatgtagacgttccgcgcccgatttcatcaaataaaatcaggcttcgttccgttgcgtttgcaatcgcgtttttcgcttccagcatttcgaccatgaacgtactctgaccggaaatgagatcatcagctgcgccaatccgtgtaaaaatccggtcaaaaaccggtagctccgcctcgcgtgccggcacaaagcagccgatttgcgcaaggattaccgtcagtgcaatttgccgcatatacgtgcttttcccggacatgttcggcccggtaatcagcagaatctcccggttttcatccatcaggcagtcgtttggcacatagctttgcgaatcgagcactttttcaacaaccggatggcgcccttccgtaatcttcagcacgccgtctgtccggaataccggctttgtgtagtggcgtttttcgcttacgacggcaaagctttgcagcacatcaatcatgctgaccgcttttgcgaggcgctgcagccgtggaataaattcttttacatgtgcccggatttccgtaaacagctcgtattccaggtcgatcattctttcttccgcctgcaaaataagcgcttctttttctttcaattccggtgtaatgaaccgctcggcattcgccagcgtctgtttccgttcataccggccttcttcgagcaggtggaggtttgccttcgtcacttcgatatagtagccgaacacgcggttgtatccgactttcagcgacttgatcccggtccgctcgcgctcttcgcgttcgaggcttgcaatccactgcttgccgtttttgcttgcgtcgcggtaacggtccagctcttcgttatagccgtcacggatcatcccgccttccttcacggaaaccgggggactgtcctcaatggcgcgttcgagcaaatctgtcagctcttcgcacgggtcaagaagcgccgccagttttttgctttccgggctttccatgctctccatgaccgcccggatgcccgggatttgctgcagcgagcatttcagctggatcaggtcgcgcgcattcacattgccgaatgccacccggccggcaagcctttcgaggtcatatacttccttcaggcgcccgcgaatatcctcccgttcaaagtaatggtttaaaaaggtttccaccatttgaagccgcgcttcaattttttcttgcttaagaagcggccggccgatccactgttttaaaagccgtccgcccatggccgtcatcgtttcatcgagcagccataaaagcgatcctttttttccttgcccgcggatcgtctctgtcagttcgagattgcgcttggaataataatcgatgtttaaaaaccggcggacttcatacatttcaaccggctgtagatggtcgaggctccttttttgcgtgcggaataaatagtttaacagccttgccgcagccagctgcaaaagctccggtttaagctggggcaaaagtttttcaaagccttccttgacggcggtatccgtttcgaaggaaatggtgacatttcctgtatttttcatcagccgcgcgtactcatccggaaattccggatctaccacagcttcttttgcgccgattgacgccagttcattcagcacttcttcaaacgggccttccaacaggcaacccttgccctcccctgttgacaaatcaatataggcaatcgcgaaatgcccgtccgccagggatgcaacagacgcaatatagtggttttctttttctgcgagcgatttgccctccatcagggtgccgggggtaatcagctggatgacttcccgcttgacaacgccctttgccagtttcgggtcttccatctgttcacatattgccactttatagcctttatcaatcagctgttcaatataagtgctggcggaatggtacggtaccccgcacatcgggattttttcgtcgccgccgccgtccctgctcgttaatgtaatttcaagttcctgggacgctttaatggcatcttcgaaaaacatttcatagaaatcgccgaggcggaaaaataaaaaggcatcctgatattccgccttcacttgcaaatattgctggatcattggggtatacgcagccattcttaccaaattcctttcctgcttatcaatcattcttcaatcctgtttattataacatatttgcataaaggccttcataaattgaaatacggatcattttacaaaaaccgggccttgtctgttgattttcaatgcctcctccggggtgccgggttttttctttcctgtggcaaagcccgctgtggggatccgggaaaaactttaatcgcattctaagcggcacaagcgttttggtggtgaaatccgccgcgcccagaaaaaaactaggagtgtatgcctcctagtttgcggcttctattcttcttcacttcccactaaaaagtcagggtttaattcttcaaactcgtcgctgctttcttcccattcatcatcatcgctgcacccttcaggtgagatggcaacacaaacttttgtttcaccgatgacttccacgagaaactctctttcgacactgacaatgattttattgccgtttggcgaaatgaccgcttcaatgcaattcggctgctgcaggacgcttgcgatgacttctttgtcgtccaggcaatccggatccctgtaatgcaatttaacggtatcggtatactcgactttttccgtcatgaccgatgtcttcgtattgtcattatgggagtaccagatgttcacatcataagagccgcggattttaacttctttatctattttcctggcttcgtacttatggttgataatccagcagcctaaaatgctcgaaggatgctgcggcgggcaaatcgtatgattggactgcgtaaatttgcgccctttcgcaacgactgcttttgtaatgatttctctatattctgccattcgagcgaaccctcctcatctattttcaattcatcctatgcttttacccaggccggtgtgccaattctttttcccgccacctccgggtaatcctaacatatgccgcggctctgaaggagtgcccgtacccgggaatggatttgccttgggcgtgcaaaaaaaacggtgtgcacccgggtgcacaccgtttttttcagtggagggtgccggaagaatatttcacctgggatccggtttggccttttaaaagatcgccgccggtggatttgatgatttcatccgtaaccgtattggaaatggtgtttgttacaagctggagcaggtcgtttacgtccatctgcgactgcttgaactcctggacgaccgggatgccgtccagttcttcttccagttcgtctattttggcttccacttgttttaacgcttctttttttccataatgctgcaaattgacagcctgcttttgcaaagctttgatattggcaattaaattgcggactctctcattttcattgatttgcgcttccgcccgtttaaaaaaatccacttcttccgtttccgcaatcattttcgccagttcggcagcttttgcgacaatatcatcttttgtaaacttctgcatcacgcttccaccccggccgggtcaagcacagccaccatttccccgtccagtgaccatgttttcgccttcgtaatttttacctgcacgagttttccaatcgctgatttcgggcctttgaagttgacaagtttgtttttgcgtgtgtaaccggctaaaatttccggattgtttttgctttcgccttctacaagcacttccacaacctggccttcgtatttttccatggctgcttttgaataggcattgacgagttcattcaggcgctgcagcctttcctttttcacttccatcgggatattgtctttcattctcgctgccggcgtgccttcgcgtggggaataaataaacgtataggccgtttcgaacccgacttctttataaagggacaatgtttcttcaaactgctcttcggtttcgttcgggaaaccgacaataatatcggtggacagcgccacatccggaatcgcggctttgatttttctgacgagttccaaatattgttcccgcgtatatttgcggcccataatttttaaaatttcgcttgaaccggactggaccggaagatggatatgctcgacgaggtttccttttttcgccagcacttcgatcaggcggtcgtcgaaatcgcgcggatggctcgtggtaaagcggatgcgcgggatgttgattttgcgcagatcatccatcaaatcaccaaggccgtattcaaggtcgtcaaaatcttttccgtaggcattgacgttctggccgagcaacgtgatttccttgtagcctttggcggccagttcgcgcacttcctggatgatgtcttccgggcgccttgaacgctcttttccgcgcgtatacggcacaatgcagtacgtgcagaatttatcgcatccgtacatgatgttcacccatgccttgatgttgcctttgcgcactttcggcaggctttcgatcacgtcgccttctttggaccatacttccacaaccattgccttggacatatacgcttcttttaaaatgtacggcaggcggtgaatgttgtgggtgccgaaaaccatatcgacatgcgggtgtttttgcaaaattttattgacgacggattcttcctgcgacatacagccgcaaaccccgatcagcatgtccggtttttccgttttcaacggtttcaggtggccgatttcgccaaacactttattttcggcgttttcacggatggcgcatgtattcagcagaaccacatccgcatcttccaccgtttcggtcggcgtgtagccaagctgcataaaaatgccggccatcacttccgtgtcatgttcgttcatttggcagccgtaagtccggatgtaaaatttcaatccgtcgcccatgccttttaagtcttcatcgatttcaaagtctttaaaatactggaccggtttccggctgcgttttcttgcttcttttaaatttggcggaatataaaccgattggaaatatttgctgtagtccttttcggattttttgtccgcaggctctacagggttcacttgctgctgttccaaacgctgtttctcgttcatggcaatcccctttctgtttgcaccatgccgcgctattgcggcaaccatataaaaatcatgcgtataaccagtataaatggttttttctcctattacaacaaacctcgtgcccggcttgtgccaagtttttcacgatctaggaacaaccgggcttcaaatcccggttgtttaaccaattaacacggatctgttcgcggtttgtgccggagtcgcatttggcaaaacgccggggatttgcgctttaccggaaaaaagggggcttacctccgcgcccggcgcaaaaagcctcttcctgtatcaggcagaggctttttgcgtttctcatccgttttggattttatgcctttacttgcgataaaacatgtttaaacgtgcggataacctggtcgacttcttcatagctgatcgtaagcgccggttcaaagcgcaaggtttttgaattaatcaatgttcccgcaacaagcacacccccgtcaaacatgccttttgccacttcataaccgagttcatccgagtggaattctactccgatcattaatcctttcccgcggacttcctggacaatgtcttcgtggccttttgccgcctcttttaagccgtttaagaaatattccccgcaagcagccgcgcgttccggcagttttccctcgatgaggacgccgatcgtggcaattgccgctgcacaggcaagcggatttccgccgaaagtggtggtatgcatgaacggattcgggaaccagcttttgaacacttcttctttcgcgaccaccgcgccggccggcatcaccaggtaagaaaacacatcttttgccgttttatagcgctttttccggaagacaaagaaggcaacaacagataaattgacgaatgtaaaagcaataagagcgccaaagttgataaacgaggaaatgagctccaggctgggcgtgatcgcaagcagcgacaccaggccgacaaggattacattccaagcgggggtccggaattttggatgcacgtatccaaaccatcgcttcggcaggacaccgtttctccccatcacatataacagccgtgaaacactggcatgggaagcaaggccggacgcaaccgtggcggcaaatgcaccggaaataaacaataacttaaacagcgttccgcccacgtacaatccgatttcgggcaatgtgtcatccgtgtttttaaaatgagaaacgtccggaaacaaggcttgcgcgaaataactggcgataaaaaagaccgctccgccgataaaaaccgtcagcatgatcgctttcggcatgattttgggatctttcgcttcctccgcatacatcgtcaccgcatcaaagccgataaacgagaaacatacgactgtcgcaccggtcaggaccgcgctcaaacggacaccggagtggtaaagcggatcgaaagtgataaccgtgccttttcccatcccgtgcgaaaattgtacaatggccagcacaagaaaagcggcgatcagcaccaattcaaaagcaacaagaatggtgttcatattggacgttttccccatgctccatacattgatgcccgtcacggcggctacatacgccaccacccagatccaggagggcacgtttggaaagacggataccatataaatccggataattaaagcattcaccatgggcaacagcaaatagtcgagcaacgccgcccatccgacaaggaacccgagatgggggttcatcgtttcccttgtatacgtgtaggcagatccggcgttcgggaaaacttttaccatcttcccgtaactgatagcggtaaacagcatgacaatcaaagctgtgatataggcaagcggcaccaccccgttggtttcctttgatacgatgccaaaagtatcaaacacaatggtaggcgtcatataccctaacccgagtccgacgatggcccataaaccgagtgaacgctttaatgtcacattctccaattttatcatcctccctctctattccacaaatcaaagatgtttgctttttggtacgccaataaggcagatccgcttccatccacatggaggcctattgttctacatctttgcaattttcataccaattgccggaaaaacaagaggaggatttgaaaaactcggaatttgggaaaagcagccgcagggtttcggagggaaaggcgagaaaaaggaaaacttcttatgcaaaaatgcatagcataatctattttgcataccattggaaggcaaattgacgaaagccggggatgaaaaacggcggggacatgttttgatatcccgccgttttgaggtaaattttcattcacttggagcctgaacagggaagtttgaaaagcgcgccgtactcaccggcattttgcgtatccgcatcaaatcataaggttttacaggatggtcggtgattgttttcacggtcatcagcgcattcggggcacgttcaatgcatttgccgtcttcatcccaaagcttgcggatggtttgtgtgaaacgggaaaatcccggcccgtaaaactccacttcttcccctgccgcaaaatggttgcgctgttcaagcgtggcgatttttgtagccgggtcgtaatccaaaacgcgggcagcgaaagtatatttcgggattttgcgggggcgcccgaacagttgctggcgggcatccggttccccaaagtaaaaaccggttgccagttcccgttgtgccactttccaaatttcttcctcccacgccgggtcaaaaacaaaatggcctggatctatgcaataggcatcgacaatcgcccggtacacattcgccacagtcgaaacatagtggatcgacttcattctgccttcaattttaaaacttcccacacccgcttcaatcaattccggcacgtgatggatcatcgtaaggtccaccgcactcatggaaaacggctcgccgccggctgttaagatgtcggccccatcattttcaaacaagtcatatttccaacggcacgactgggcgcatccgccccggtttgcgtcgcggtttgccatatggttggacagcacgcaacgcccggaatacgaaatgcacatcgctccctgtacaaacgcttctatttccataccggtatttttccggatttcgcggatttcttcaaggctgacttcgcgggccagaaccaccctttcgaccccttcctgctcccagaactgaagcgctttgtaatttgttgcagaagcctgggtcgacaagtggacggcaagtccgggcgcctcttccatacaaatggtgataaagcccgggtcggagatgatgacagcgtcaatcccgatctcctttagtgtgcggaaaaaatcccctgccccttcatcatcgccttcatggctgaccatatttgcagctacatacacttttgcgccgcgggcatgcgcaaagcggaccccttccttcatctctccgtacgtaaaattgccggctctcgaacgcaagccgtaagcctgtccgccaatatatacggcatccgcgccatagcggacggcgatttccagtttttcaagatttccggccggcgcaagtacttccggttttttgatgatgtttcgcatattctccctcctactgtacttcatccggctgccgcaggaaaaaccccgtgccaagcttccgcgtttccggctgcaattgcaaaagctcagctgaaaaacgcgccgcatcaaatgtgccggacagcaccgcttcttttgcccggacataaagggcggcaatgtccgtaaaggtttccccttcggccaaaatgccgtcgattttccacgtatccagcccggccctgtgcagatccggcaaataccgaatgagcgcaatgtcttctgcggaaaaaatatgggtgccattttcatcctcaaaaagcggatactgcttttcccggtctttcttctcgctgatgctgagcctgtcatggacagttgtgccggcatcaagatgcgcaaattgggtgtaattcgaaagcaaacggcgcttcgaatggtggatgcatgtcgggccgtatacttgtacctcgacgggctgcctgatttgcgcctgtatttcttttaattcaataaaagtacattcgcgcgccgccacggcacctattgccccgcgtttgagccagaactttatctggtttgccgatgtgacaagcgtctgtgcatcgtaaatataaggcagattcagtttcatttcttttaagagctgtatcacgcccggatccccggcagtgatcgcatccactcccgctttttcaagcgatgacaaatattccggaagcgcctctatatgtccgttatgcatcaatccgttaacggctgtatacactttcctgttctgccggtgtacaaactttgtaatgtcgcctatttcttcaagcgtgatatggccgggcatgcgcaggccgaaacggttccccccgatatagagggtatccactccggccgcaatcagcgcttcagcctgcccggccgattcagcggtagcaacgatatggatcaacttccacccctccttcagccgctttttcaggctgcagtaaaaaaaacgccaaaaaggcgcaaagataaagcgtgccacgattttactttatcatgggtacgggtcttttttgccggcaaagtatgacagtttccgcaaaccttttttccatgcaaaaaaagctgcctgcttctgcaaacagcgtttctttccaatctatatcagcggggttcaacgatgagtttaatagcggttctttcttctccttcaatctgaatgtccgtgaaagccgggatgcaaattaaatccacaccgcttggggccacaaaccctcttgcaatggcaacggcttttacagcctggttaatggcgcccgccccgatcgcctggatttccgccccccctctttcacgaagaacaccggcaagtgcaccagctacagaattaggattagattttgctgaaacttttaatatttccattccttctcctccttgtctccttccgttaaccgaatgtccgttcagagtgacgattcatattcgaacgtgaagtatctcttgcccgtttccagcccggccttttgtagcttcgctggaaatggggcggctgccttaaaatccggcagccgccccgcatatcaggctgctgattctcctgcttgtcgtgcgggctttcatgaacgtctcttgctcaaaaaactccggggagctgcccccgcacagcgggaaaaatcatttcactgctactatattcctttgttttgcgagttatgccatccttcataagcgccggtacataaaaagaggcgctcttgtgcccggcatccatccggaaacagaaaaaacccgtttattcagagataaacgggcggtcttcattgattaaaatattttggattgttgcagctttgcctgtttttttatcaaggctgatgatgcatccgcttaatattttccttcccgactttggtacttcgaaacggacgggaagcgaagtcagaaattttttcattactgcttctttgtccataccgagaatggcatcgtacggaccggtcatgccggcatcggtcagataggcagtaccgtttggcaaaattcttgcatcggcggtttgcacatgcgtatgggtcccgatcacggccgacactttgccgtccagaaaccagcccattgcctgtttttcgcttgtcgtttcggcatggaaatcaacaaagataaaatgggttctttttcttgccagcgccaccatctcttctgctttccggaacgggtcatcgagcgcattcataaacgttctgccctgcaggttgatgactgcaaactccgttccttccgctttgatcagcgccatcccttttcctggggtcccgtccggaaaattggccggacgcaccatccattttgcttcctcaataaagtcaaaaatctctttgttgtcccatgcatggtttccgagcgtgatgatatccgcacctgcatccagcagaccacggtaaatgtttttggtaatcccgcgcccgccggctgcattttccccgtttacgatggtcaaatgcggcctgtatttcgcctttaacttcggcaaatattcgttcaccatctcacgccctaatgacccgacaacatcccctataaatagaatctccatgcaataaatcctttctttgctttataaaaccatcttcattttctttcaaaacgtttaaagaaaataagcggtgagcacgtcaccgcttattttgcatattcaacagcccgcgtttcccgaatgaccgttactttaatatggcccggataatccagctcattttcaatttttttgcggatatcacgtgccaggcggtgggcttccaggtcgtcgatctgttccggtttcaccataatgcgtacttctctccccgcctggatagcgaacgatttttcaacgccttcatacgattcggcgatttcctccagcttttcaagccgcctgatgtaatgttcaagcgtttcgctgcgcgccccaggccgtgcagcggataaagcatcagcggcagcgacaagcaccgcgataatagaggtcggttccgtatcgccatggtgggaagcaatactgttaatgaccaccggatgttccttgtatttggttgcgagttcgacgccaatttgcacatggcttccttctacttcatggtctaccgcttttcccatatcatgaagcaggccggcacggcgggcaaggatttcatcttccccgagttcggcagccagcaatccggaaaggaatgcgacttctatcgagtgcttgaggacattttgcccgtagctcgtgcggaattttaaccggccaagaattttgattaagtccggatgaaggccatggacaccgacttcaaaagtggtttgttcccccacttcgcgtatatgttcatccacttcccgccttgctttttcaaccatttcttcaatgcgggccggatggatgcggccgtcttgaaccagtttttccagtgcaatgcgtgccgtttcccggcgcaccggatcgaatcccgaaagaatcaccgcttccggcgtatcatcgatgatcaggtcaatcccggtcagcgtttcaagcgtccggatattgcgcccttcccttccgatgatgcggcctttcatttcatcattcggcaaattgacaaccgataccgttgtttcagcaacatgctcggctgcacaccgctgaatggctagcgaaagaatgcttttcgcctttttgtcggcttcttcttttgcccttgtttccgcttcctttaccttaacggcaatgtcatgggaaagctcgttttccagtttttcaataataatggctttcgcctgttcgcgattgaggcccgagattctttccagctcagactcctgctcgttaaccatctcctccaatttgctttccatctcttcaatatgttgttgtctcaggtttaaagaatcctctttctttttaagcatcgattcacgcttatcgagcgattcatctttgcggtcgaggttctcttccttttgcaataagcggttttcctgtctttgcaattcatttcttcgttcacgcaattcccgttccatatccgtacgaagtttatgattttcatccttcgcttcaagcagggcttcttttttcaggcggtcagcttcgcgttttgcttcatcgacgatctgatccgccgcatttttcgcccctgcaatttttgcttcataaattgatctccggatgaaatagccaacaactacaccgacgataaggacaagcaaaagggagatgatccatatgagagactccatcaatctcacctcctcttgctatgaacttcttccacgttaaaaaatgtcggctgttacattaatccttaggtttacagtatacagcgcctggcttaaaaagtaaaacgtcgatcccggggcaatcccctccggtgcataggcatgaaaacatcatgcgtttcgtcccggtccggctgaagacaaggatgttctgtcagccgtacgcggaaaagctgccggattaaaaaccggctcccttccggaaacttccgggagggtttgctttccgtacaggagaaagtcgtttttagaaaaataaaatatacatattaattttaaaggtgggaatttttattgtcaagtgaagcggaaagattgccatcgtaatttgtgttgatccctttcagccatgcagcttttgcggcgcaaaaaagcccggtggaaaaggacggcaaaaagcgcctggatgcggtcagcatttcaggcgcttataggttactccaaattcaattcttcctgtccttccacagcttccttttcatctgcagcattttcggtttcatgggaaccggcatcttccgccaggtcataatgttcccggatttttgcggcaatctcgtttttcaaatccgcattttcctttaaaaactgtttcgcattttcacgcccctggccgagccgctcgccgttataagcataccaggccccgcttttttggatgatgtcaaggtcgcttcccatatcgacgatctcgccttcttttgagatcccttcgccgtacataatatccacttctgccgttttaaacggaggcgctactttgtttttgacaaccttgattttcgttttgttgccgacaatgtcgctcccttgtttgatctgttcggcacggcgcacttcaaggcgtacggacgagtaaaacttgagcgcgcgtccgcccggtgtgacttcaggattgccgaacatcacgccgactttttcccggatttggttaatgaaaatcgcaatcgtgtttgatttgttgatcgcacccgataatttccgcagcgcctgggacatcagccgtgcctggaggccgacatgggaatcgcccatttccccttcaatttccgctctcggcacaagcgcagcaacggagtcaatgacaacaatgtccactgcgccgctgcggacgagcgcttctgcaatttccagcgcctgttcgcccgtatccggctgggacaggagcagttcatcaatgttgacaccgagcttttgggcataaaccgggtcaagtgcgtgttccgcatcaataaaggcagcctgtccgccctgtgcctggacttccgcaatcgcatgcagggcaaccgttgttttaccggaactttcagggccatatatttcaatgacgcggccgcgcgggtagccgccgacaccaagggcaatatcaagcgcaagcgaaccggtcgggatcgtggagacaacccggtcggtctgctcgcccagccgcataatggagcccttgccaaattgcttttctatttgtttcagagcctggtctaaggcttgttgacgatcattcacaaaatttcctccttttattcatcacggactcttgaaagcaataaatctatatctatactatacccgttttttccgtgtttgccaagcaaaatgtcgaacgcctattcgtctcttttttgcaaaaatccggcaaaaaaaatggggtttttcccctgcaaaaatggaaatttccccggcaaaaagggccgaaaattgaatttttggcaaacaaatttttttcgtaaaaaggccgcttccgccatttgcaatgagcagaagcggctttcggactaaagcagtttcagcaaatgccagcagccgtatttcactgatctcgtgcggacgttgttccgggatccggaaagttccaacagataggcggccgtttctttcccttttatggcaatgccgatccacacggttcccggcggatggccttcaagggggtccgggccggccacacctgtaaaactgatgccaatgtcggcatccatgatgctgcggatattttccgccagttcttttgcacactggctgctgacggcgccgtacttgtcaagtgtttcttttttcactttggcaagcttcatcttcgcttcgttcgtatagacaacaacgccgcctttcagcatcgtgctgacaccctggatggacgccatttccgctgcaaatttgccggcagtcaggctttccgcgcaggccagcgtcagctgtttttctgaaagtttttcaagcagggcctccattaacgtcgtatcgttataaccgtaaaaatacgatccggcaatttgcaaaatctctttttccacttgatcgatcatttggttcgccgttgccaccgactggtgtttcgccgtaatcctgagtgtcacttccccttctttcgcaagcggagcaacagtcggattgctctgggtttccaatatttggcggatttctgtttccagttgggattcgccgatcccgaagaaacggagaacgcgcgattcgattttttcgatcgtttccagttcatcctggatcgcgggactggcataatggataaacatcggttccagttcatgcggcgggccggggagcagcaagtaatagtggtttcgacttttggccagcatgcccggcgccatgccgtggtcattcggaaacactttcgagccttcaatgacaagcgcctgctttttgttgttttccgtcatttttcgttttgtacggataaaaaactgttcgatggaacgcatggcatcttcgtctgtgaccagttttttttcgatatgcgatgcaatcgtttcttttgttaaatcatcctttgtcggaccgagcccgccagtaaaaatcaataaatcggcgcggtcctccgctgtacggattgccgcttcgagccgctctgcgttatcgccgacaacggtctgataatacacatccacgccgatttccgccaattgcgcagcaataaatgtggcgtttgtattggtgatctggccaagcaaaagttccgaaccgactgcaattatttcggcattcactttccattcctccctctcttttaaagcaaaaaacgaacacatggcggcaccaatccagaagacccgaaatccgccccgcaatgccgccttttcccggaaatcctgcggcccgtgccgggttagcatcagcgccggcgggcaaaaaagcagtgagaggctctcactgcttggttatttcgagcgggcaaatacgccccggtttaaatagaaataatcagcgcctgaccagatggtaaagatgagcgccacccacaaagcgaccagatccatgcggaatgagagtgccgaaaacgggaagttatgcaacagcaataaaaggatggcaatgatttgcgtccatgttttgatttttccaagcatattggctgctgcaacttccccgccctctgccaaaattagccgcaaacccgtcacggcaaactcgcgggcaatgatcacgacaacaatccatgccggcgccagcttgagcccgacgagcaaaataaacgccgttgaaacaagcagtttgtccgcaagcggatcgaggaatttcccgaagttggtaacgagattgtatttgcgggcataatggccgtcgatccagtctgtcatggatgcaactgcaaaaatcaccgcaccggcaaaatgggtgaccggaatttcggctcccagccattcaaaggtgccccaatcgaacggcaccgccatgatgagtaaaaaaacagggattaaacatacgcgtgatacagtaattttattcggcaaattcactggattttcctccaactgtccatatattttccaaagaaaaagccttaaacaaggcttattccgtttgtgggccgttaaactggatgatcatatcctggcgtacttctttggatgccggaatatggtattttagttctttgccattgatatacacttccgtattgacggtgtttccgatcgtaatcgtgacttgtttttgatttgacagatccgctgtccggctgtccccatcattcagcaattgttgaaagttggttgaaccgtcgctgtttttcacctgtacccatgatcggccgccgtttgctttcagttcaagtttgaactggctggtgccggccagtttataggtggtcgtgtacccgcttgaagacacggtttccagtttttgggctgttttcttcgtttccgatgccggtttttttggcgttttcgccgcatttttttcggaagagctaccggtatttctgccggatgacaccttttcagccgattttatgctttctttttgcacgcttacattgccggaagccccgctgtttaatttttccttcgtgttgtggccggcaagcttatatacaacaaaccaaagcaaaaataaaatcgcgatgatggcggcgacgacaagaatcctcggcagcacgttcatcatcttgacggtatccggtgcagcccttttgttggacgtctgcacccgcgaaagttgctcgggaaattcttcctgttccgtacgggggatgtcgctttcatactcttcaaataaagtttccgggtcaagcccgactgcctcggcatactgcttaataaatgcccggacgtaaaattttccaggcattgaatcataatttccttcttcaatgtttttcaaatatcttttttggatcttggtcatctcctgcaaatcatccaggctgatgcccttttctttcctcgcttcttttaaacgattccctaattccgtcatggtaacacctgccaatctagtaatcaaatcctccaaatccgccttgaaacatccggttttgctggagcaagtcgtatgtaatttcctgtgacgggtcttctctcaactcaataatgtaatcaaaatcatcgagcgtgtattccgaacgctgcacgaaaatatccgggtgttccaccacttttacagccgggagccgcatgatttcacggatcatctgccagtgccgttcgtttcccctctcagcggatacgatgccatccaggataaaaatattgtttggattatattcatcctcaatcaggctgcttctcaccgtctgtttgatcatcgtggaggaaagaaaaatccactttttattggcacacacgcttgccgccacaattgactctgtttttccgacgcgcggcatcccgcgaatgccaatcagcttatggccttcctgtttaaaatgctcggccataaaatcgaccagaatcccgagatcatcgcgcacaaagcggaatgttttccggtcgtcatgatcgcgctggatataccttccgtgccggaccgcaagtctgtccctgagcttggattccctgattttcgttacttttatcgtttccactgtttgcaatatcgattcgagccggccgatctgttcttcatttttgacaagcagcagcaagccccgttttttatggtcaacgccgttaatgcttctgatattgatcgctaacatacccaagagggaggaaacatcacccaaaagccccggccggttgatcgtgatttcatattccaagtaccactctttcctgtcatccactcaaaccccctcccgaaatccggattccaacgaacatatctaggttatatgatatatgatttttcagcaataaggaagtgaaagctctcagttctgaagagtaaannnnnnnnnnnnnnnnnnnnnnnnnnnnnnnnnnnnnnnnnnnnnnnnnnnnnnnnnnnnnnnnnnnnnnnnnnnnnnnnnnnnnnnnnnnnnnnnnnnnttttactcctcagagctgtgaaagctctaaaaatcgtgaattttgtcgggacatgaaaaaaaccggcggcatcaccaaacagccggcttttaaaaagccgccaattgttattgtgatgcgccggtatttctttatgactgggtaccgttattttgaacgagttttaccattacattggcaatggcttgctgctcttcctgcgatgccactgaccataaatcggcaagaacgcgttcctgttcatttttcggatctacttgtgcggccaaataatcgccgacctgctcagcaagtttgttaatcgtttcctggggcatcccctgttgctttgcctggttgaggcggtcccccaaaaagtttttccattggtcccagttttcaaatacgttcatgtcacagcctcctttcaagttgttcaaccttagcttgtgacccggcttggaaggctatgcatggaaaatggaacccgtgcttctttcaaggcaccggccgggcggaacggtgctgcggttggcaaatttgcccgttttttggttaacccgcgtgaaaaaacaatgcggattcctttgcatcttttgccgggcggggctacatataccagcccccgttgacgccaatcgtctggccggtgatgtaaatgctttttcccgagagcaggaaagaaactgcgccggcaatttcttccggtttggcaagccggccaagcgggatgtccgcttcgagatctgaaatttcttccggcgcaaacctggcaagcatgttggtgccaaccgccccgggtgcgactgcattcacgcgtacgccgcttcttgccgtttctttagcgagcgcttttacaaatgcgatctgtgcgcctttcatcgccgaatatacggcctcgcacgccgcgcctgcctgcccccagattgaactgacaagcacaatgtgcgaaacctcattttgccgcaatttgggcaacaactgcctgataatcagaagcggcgcctttacatgaatccggtaaagcttgtcaatggcttcgtcatcgatatctgaaagtagcccgtaatgggaaatgccggccgcatggatgatcgcatcgagatgaaaaacattttctgctatcgttttcacggtgccgtctgttgtgaggtcggcgcggatcgggatcgcttccgccccgaattgccggcagatggaaagcagttctttgatcgccgcttcattttggtggtaatgcaaatacagattccacccttcttttgccagcatttcagctgtggcctttccgattccgccgctcgcacccgtaatcaacgcaaactttttcaattttctcccccatttaaaaacccggggctaccccgggttatttcggtaaaacctggcaaacggtaaaccgttcttcatcaaaaaaagcttccgccgtttccagcacatcgctgaaccggatttgttcaagcacagggacaacgtcaaataaattcatatcattaaacgcgtatcttgtaaactggttggcgataaattcaggtgaattcagctggcgcagaaatcccccgatctttttctttttcgtccgttcaagcgcttcttctgccaacccttttccttcttttgccccaaccatcacctctttcagccgctttgccaaaagatccggatctttcgtatcccctccggccatcgcaaatccgaatccctgctcctgggaatagtcaaaagaaaaactggtgtcgatcaggccgtcattgtacaacgcattgtacgcatctgaactgcggccgaacagcatgtcaaggagaagattgaccaccagttcgttcttttgcatttcagcgccgcgctggctcgtatgaagcgcctttacgccaacaaggcattttggtatctgcacattcatatgcaatttttgctctttttcggccgcctgtgccggttcttccggaaaacgccttttaatctccggtgctttttcgtactttttcttcgcctggttttctctcataaaagaaagcacctcatccggcgatacatttccgacggcaaacagcagcatattgctcggatgataaaatgtatggtaacactcgtataattgcgctgcggtgatttttgcgatcgagtcaaccgtgccggcaatgtcaatttttaccgggtggtgtgcatataaattttcaatcaggccgtaatacagccgccagtccgggttgtcattgtacatcatgatttcctggccgataatccccttttctttttcaaccgtctgtgcggtaaaatacggcgtttgcaccatatccaccagcgtttccaggtttttcatcacctgatcggtgcttgaaaacaggtaggccgtccggttaaaactcgtgaaagcattggccgatgcgccctgccggctgaattgctgaaacacatccccgtcttctttttcaaacattttatgttcaagaaaatgggcaatgccatccgggacccgcacaaaatcgcttttcccaagcgggacaaacgtgttgtcaactgaaccgtattttgtcgtaaacgtaacaaatgttttgttaaacccgcgcttcgggagcacatatacttttaatccgttatcaagtgtttcaccgtaaagcgtttcgccaagctgactgaattgttgggtttccatttatttcccctccattccggacaagaagtagatcgtatcgggttcaatttttgcggccactttcacaatttcccctttttcgactgccttgatttcccttatccaatcttccacgccggtttcggtgccggcaatgacgttatggtacaaaatttcaacgaggccgcgggatgtatccgttgactcaagcagctggttgcggataacggctttcgtttgcccgatttcctgttcgctgaaatccccgtttttcattgcttccagctgtttttcaataatggagacggccttgtcaaaattcgcggattcgatgccgctcatcaccatcatcagccctttatggctctcgatctggctcgcgacataatagcaaaggctttctttctcccgtacattcaggaaaagcttggagtgggaaaaaccgccgaaaatgccgttaaacatctgaagcggaaaataatcgctgtccccgaacgtaatattggtgcggtagccgatattgagcttgccctggcggatatcctgggattccttgatttttttgacgccggagaccttttggagcgttcttgaggcagcccgtttcggctcgcggtccggaaaacgcaggcattcgcaaatggccgcaagacggtcttcatcgacatcgcccgtcacaaacaagtccagttcatcttcccggatcgctttttgataatattgataaagcgaagcgggcgtgatggcgtccacatcatcaagaacgccgtttgcctgcagtgcgtacggctcttctttgcacatttcttcaatcagccgcatgcttgcataccgcattttatcatcgtatacagactggatccgctgtttcagcacccgtttttccttctccaccgtttggctgtcaaactgcccgccgtctgcatgcgggttcagcaaaacttccgccaaaaattcaactccccgttggagcagcggttctgcatcctgcaaaaatttttcgttcgcaatttcaatcgtaaaggtcagaatatggtattccccttttttggccgtatcgatataaaaatgagcgccgtacaaatcatcgagatacgcccttaattttgcggtcgtcttcaatcgccccgtgctgctttgaagaacattcgggagcagagcccgcagcgtaaccgtgtctttttcaagtggcgctttcattttccatacaagcgtattcgttttgtatttgtccgttttgatggtatgtagtgtgtaccctttcattttgcgaaccgtctcttttgaaatggccatatggatcctcctttttcaacgagcttcgtgccaatagtaaaagtatgcctgactgcggggttgtttaacctgtaaatgcattaattttactatacaggggagacaggtgtcccggcaagttttacggcacataaaaagaaccggcaccagacggggaaagcagcctgatgccggatggaataaattagcgttcacccttgatataagggacaccgtccgctttcggggcttccgcacgcccgatgaacccggcaagtgccagaatggtcaggacatacggcgcaatgagcaaataaacgttcggaatttctttcaaatacggaatgctgttgccgacgatgctgaggctctgcgcaaatccgaaaaataaagcggcccccatcgcgccaagcggattccatttgccgaaaatcatcgcagcgagcgccatatacccttgccctgaaatcgtcgaggaactgaaattcagggtaatcgactgcgcgtacacggccccgccgatcccgccgaatacaccggataaaaagacggcaaagtaacgcatttttacaacattgatgcccatcgtatcggccgccatcggatgttctccgaccgagcggaggcgcaggccgaacggcgttttataaaggataaaccagacgagaatcgcaatcagaatggcgatgtacgaagggtatgtgatcccctggaaaaacagtttgccgatcccgggaatatggctgaggccgggaacatccacctgttggaaatattcgctgatcgtattggtctggccttttccgtaaatgtttttgatgagaaacatggcgacgccgagcgcaagaaagttgatcgcgacgccgctgactgtctggtcggcgcggaaagaaatggatgcagccgcatggatcagggcaaataatccgccgacaagcatcgccaccagcaccgcgatccacggcgtccaggcgcccagggcatgcgaaaacgttaagttaaagacaatcgatataaaagcccccatgatcattagcccttcaaggccgatgttcaccacgccggaacgttcggagaaaacgcctcccaaagcagtaaaaataagtggcgctgcagatagtaaagatgccgaaatcatgatttccaaagcggtcatgaaatgcattttatttcgcctcccttttcaaacgggccagagaccatttgatgatatagccggatgcgacaaaaagaataatcaaagcaatgacaatgttgaccagctcattcggcacattggcatcgaccggcatgttcagcgagccgacttttaaagcaccgaataaaacagctgcgatcaaaacgccgggcgccgtattcccgccgagcagtgccaccgcaatgccgtcaaacccgatgccggagaaagaagattgcaaaaaggcaaagccgtaattcccgagcccctccattgcgccgccgagcccggcaaaagcgccggagatgaccatggaaaggataatgctgcgattcacactcatgccggcgtattcggatgcgctctggttaaacccgaccgatttcagttcaaagccgagcgtggtcttttcaatgataaaccacatcaccacaacagcaaccaaagcaaggtaaatgccattgtgcaaggtggaaaagtcggtaatcttctgaaaaaaaggagacgaaagggatgccgaatgatgaatatgcggtgtcgtatcctgctgctttgaaagcacattccggattaaatagttggatgtgtgcagcgcaatataattcatcataatggtcacaatgacttcgtgcaccctgagccgcgctttcaaaaggccgggaatgaatccccaaaatgccccggcgcagcaggcggcaagtattgcgagcggcaagtggattacttttggcagatcaaaagcaacgccgacccagacagccgcaatccatccgacgatcagctggccttcagccccgatattaaacaacccggtccggaatgcaaatgcaatcgcaagccccgtaaaaatatagggcgttgcaagccgcagcgtttcgccgacgtaaaaaacctggccgaaagcgccgttccagagtgcaatatatccattcaccgggttatagccgctgacaagcataatcaatgcgcctgccaaaaggccgagaatgacagacacgacagggatcagaaggttcaatgttcggttagacattggtttgttcaccttccctttcttttttggaaccggccatcaagagcccaagctcctgttctgtcgtctgcttcggatcgacaatatcaatgatggccccttcgtagatgacggcaatccggtcacttaagttcataatttcatccagttcaaacgatacaagcaggacagcctttccgtggtcccgctgttcaatcagccgcctgtggataaactcaattgccccgacatcaagcccgcgggtcggctgtgccgcaatcaaaagatccggatcgcggtccacttcacgcccgatgatcgctttctgctggtttccccctgagagcgcccgcgcttttgtaaattcgctcggggtgcgcacatcgaattctgcaatgatcgattttgcctttttataaatttctttgtaatttaagatgccgttacgggacatcggctttttgtaatacgtttgcagcaccatgttttccccgatcgtataatcgagtacaagcccgtatttatgcctgtcctcgggaatatgggcgacgcccgcttccgttactttgcgcggccttaagttcgtaatgtttttgccgttcaggcggactgtgccgctgtccgcttttctgagccctgtaatcgcttcaatcagctctgactgcccattaccgtccacaccggcaatgccgacaatttcaccggctctgacggttaaatccagccctctgaccgcttccaccccgcgtgaatctttcacatgcagttgctcgatttcaagcacattttgccccgggtggccctccgttttttccgtcttgaaaagaacatcccgcccgaccattaaatgggcgagttcctgcgggtttgtatcttggacattaagcgtcccgatgcccttccctttgcggatgacggtgacccggtcgcatacttccataatttctttcaatttgtgggtaattaaaatgatggattttccttctcggattagcgtcttcataatgccgatcagttcatggatctcctgcggcgtaagcacggccgtcggttcgtcaaaaataaggatttctgcgccccggtacagcgtttttaaaatttccacccgctgctgcatgccgacggaaatatctgaaattttcgcttgcggatccacatccagcccgtaacggtcggaaatttcacggacttgctgttccgcttttttgacatcgatggtaacggattttttcggttccttgccgagtataatattttcagtcaccgtaaacttatcaatgagcataaaatgctgatgaaccatgccgatgccgagatcatttgccacattcggatctgtaatgttcactttctggccgtttacacggatttctcccttttccggctgatacagcccgaaaagtacattcattaacgtcgactttccggcgccgttttctccaagcagcgcgtggatttctcctttttttacctgcagggtgatgtcatcgttcgcaacaattcccggaaattctttgcgaatatggagcatttcaattacgtaatccaccctttatcactccttaccattggggtctaaagaaagcaatcgtcatggcgtcttcagacggcagcttcggggaatccgccctgcctttgtggatggctaaaattgtttcatttcttaaacatttttaacacgggaccggcaaaaaccagtcccgtgagatggatcgattattttaattttgacggaatgtttactttcccgtttatgatcttttgtttccagtctttcacggccgatttcatttcaggcgttaaattgtcctgtgtcggcgcaatcccgatggcatcttctttcaagccgtaaacaatgtttttcccgcccggaaatttgccgtctttcgctttggtcgataaatcgatgactgccttatcaacccgtttgaccattgaagtcagtgttacattgtattcctttcctttaaccgttacctttccttcatctgcctggtcgcggtccacaccgatgacccagacgtttttgtttggatcattctgtttaatatttttcgcttctgtaaagacgcctttcccgctgccgccggctgcatggtaaatcacgtcgatgccggatttatacattgctgaagccatcgactgccctttgcttgcatcatcaaacgagccgacatactggatttgcacatttgctttcggattagcagctttgacgcccgcacggaacccggctgcgaatttattgatcaaatcgctgtctgtcccgccgataaatccgattttattggtttttgtcgccatacctgccacgaccccgacaaggaaggaaccttcttgttctttaaacgtaatgctcgccacatttttctttccggtaatgacatcgtcaatgattgcgaaattggtatttttacgctgatccgcaattttttcaatggccggcttcagcttgtagccgacaccgtaaacgaggtcaaactgtttccggacggccgtgttcagattcgttgtgtaatctgcatccgatttggattgcagatagtcaaagccgtctttgccttttgacaagtgattgtccttcccgaactgctgcaggccttcccatgccgactggttaaaagaacgatcgtcaattccgcccgtatcggttacgagtgcaacggtaaacttgtccttacctttgctgccggaattgtcgctctttgtgccgcatgcgccgagaagcgtccctgctgccaggacagcggcaagagccaaaccaaatttacgctttttcacttttgttccccccgggaaagttatttttggataacggcttttcaaaagaaaccgaatccagcttaccgacataaatatatcattttttaattgcgaaagaaacataaatttatatttttgtcgaaaatagtaaaaactgcgcgcaccgcggcgttttgcggccgctgcggtgcgcgcaggctttttctttggcgtactacgagctctgttcttccgacggtttcgggatcaaaaccgcacgcggcttgctgccttcatacggcccgacaacccctcttgcttccattgcatcaattagccgcgccgcccttgtatagccaatccggaaacggcgctgcaacatggagacggaagcagtctgcatttccgagattaagagaactgcttcatcatataattcgtcgtcgaaatccggctggtcctggggctcttccggaatcatctcttcctggtactgggctttttgctgggaaatgacgaaatcaacgacttcttccacttcttcatcggaaagataagcgccctggacgcggaccggtttggaagccccgaccggcaaaaacagcatgtccccccggccaagcagtttttccgcgccgcccgtatccaaaatcgttctcgagtcagtcgccgaagatacggcaaaagcgattcttgacgggatgttggctttaatgacaccggtaatgacatcaacggacggccgctgcgtggcaatgatcagatgaatgcctgccgcccgcgccatttgcgacagccgcgtaatggaatcttccacatcgccgcttgccaccatcattaaatcggcaagctcatcaataatgacaacgatataaggcaaaagcggctgcttgtcccctgtttcgatattgctttttttaatatggtcgttgtatccttcgatattgcgcgtgccggtatgggaaaaaagctcatacctccgttccatctcattcacgacttttttcagcgcctgggaagcttttttcggattggtcacaaccggcgcaagcaaatgcgggacaccgttataaacattcaattcgaccattttcgggtcaatcatcatcattttcacttcatgcggtttggcgcgcattaagatgctcgtaatgatgccgttaatgcacacgcttttcccgctccccgttgcgccggccacaagcaggtggggcattttattcagctccgcgagcactgcctgccctgtaatatcccggccaagcccgatctgcagttttgcctgcgggttattttcctttccttcgagcacttccctgagcgatacgaccgcgatttccttattcgggacttcgatgccgatcgctgatttccccgggatcggcgcttccatccggatatctttcgccgccagcgcaagggcaatgtcgtcacttaaactgacaatcttgctgactttcacgccgacatcggggtgcacttcgtattttgtaacggcaggccctaaatgcacctgtgtcacacgtgccttgaccccgaagctttggaaagtccgttcgagttttgccgcattggcatggatcgctttatattcgctgctctggtccgctgcccgcggcctttttaacagcgtcaggggcggcaattgataatcttcattttcatattccgtaaactggatcggaggcgtatggtcctcttccgcttctgtatccggcgtttccggctgcgcctcttccgcttgcggagccgcgccggcatattgctccgtaaagctggaaataatcgggggaggcgtttccccgcttgccggcccggcatccccgtcatggccttccccatctgcggaggcggattgcggctgcaacggcgctttctgccgtttcttttcctgtttttcttttttggcttcccgccatgccccaaactctgttttcatctggttccattgcttttttaaaaacagccagagcccttccagtgccttatccacatacgggcttacgggcttgcccgttaaaagcatcagggcgatgagcgcgagtaaaacgcaaatgattttcgtacccgccgagtcaaataaaaaatgggaagccgcatataaaaccgcacctgccatgccgccgccgatctgcgtgttgaaaatattgccgtgcacatccccgccgagcacaagcttccaccagatctgctcctcctgatgccagatcctgatcgtattgacgaccgcactgttgccggacagttcatgcgcttttgccaatgacccgataagccgctcatggcagtaaaggagggcgctcgcaaataaaagataaaatccggtcatgcggacagtgaaaaatgcaggccatgcccgtttgatcatgagaaacacgctgagcacgaccagagaggcaaccgcaacccagtacagccggccgaagaaaaaccggaagaacagaatcagggttgtgcccgttttgccgatatggtaaagggtaaaaatgctgagcgtaagcaggataataccgagcaactcaaactttaaatctatcttaatttgttcagcagctttttttcttctgcgccgcttttttttcgccatataaccaccttcgatagtgaaaacgtatttttcagctttgcctgccggaacaggatgcaagaaagcagcctgtgtggctgcttgttttaacatattatagcatatttgcggcccgggtggtttacggcccgaaatggcggatcacatttccgggtgcaagctccgggttcagatagtcaaaaggattggagctgagaatacgggtaatccggtatccttcatcaagctgctccgccagtaccggcacgccttttacgtttaacatttcaattttattccaggcgtttgcatcttcaggaaaaatcagctcctgcggcatcatcgtgtagagaatcattggatcagcccctctttccctttttcatcccggtatttttcaatgaggctgtttaatttgccaagcgctttgccaatcccgcccacttcatcaatcagaccgtactcaacggcttcttggccaacaatattggtgccgatatcccttgtcaaattccctttcgcaaacattaagtctttaaaaacctcttcttctacatgcgaatgccgtgtcacaaacttgatcacccgttcctgcattttatccagatattcaaatgtttgcgggacgccaatgacaaggcctgtgagccggatcgggtgaatcgtcatcgtcgcggtttcagcaataaaggaatacgaacaggatacagcgatcggcacgccgatagaatgccccccgccgagcacaatcgaaacagtgggtttggaaagggatgcaagcatttcggaaatggcaagcccggcttccacatcccctccgaccgtgttcagaatgacgagcaccccttcaattttcggattttgttcaatcgcgacaagctgggggatcatatgctcatactttgtcgttttattttggggcggcagctgcagatgcccttcaatctggccgacgatggccaggcagtggatattggagtcctgcgcgagctgcggcacatttgtttggccgagctgctggattttctctacaagcgcggatgccgcatttccttctttcggttcttctttattcggttgctgttcgctcatttttctaaaaccccttttgcctgtaatgtaagggcttaatgcctttacgccttattatttgcacggaaggggttttcatacggaagccccgcggtttccggaaccggaagcggggctttgccttgcatttttaatggtgcaccaggcgggccttgtgccacaaagagggcgggcacgcgggaacccccgccccgccctctgtccggcatgggcatcaaacttccataataattggcaggatcatcgggtgccttttcgtctgctcatataaaaaggagctgagatggtcgcggatcccctgtttaatactcgtccagtcaaaagcatcttgtgacgtgttctgttccaccacttcttttacgatgttggatgaatggctgatcaacttttcggattcgcggacatagacaaacccgcgcgagataatttcaggaccggcagccagttttttatgctttttatcaagcgtgacgacgacaaccaatattccgtcctggcttaaaagtttgcggtcccgcaacacaatattgccgacatcgccaacgccgattccgtcaatgagaatattgccggaagcagttctgaagagtaaatnnnnnnnnnnnnnnnnnnnnnnnnnnnnnnnnnnnnnnnnnnnnnnnnnnnnnnnnnnnnnnnnnnnnnnnnnnnnnnnnnnnnnnnnnnnnnnnnnnnnttttactcctcagagctgttgccggaagcaacccggccgctcgcctggaatttgccgtgcttgtattccaatacttccccgttgcttgagatgatgaccgattctttcggcatccccgttttgtacgccagttttgcatgggcatacaggctcctgtattccccctggatcgggacaaagtattttggcctcattaaatcaagcatcagctttaaatcttcctggcagccgtggccggtcacgtggattttccggttgcccgcgtaaacatcggctcctgcacggtaaagcatgtcaatcgttttcgccatgaacagttccagccccggagacggcgttgtggcaaggatgaccgtatcccctttttgaatattgacctgcttatggttctttttcgccattttttgaaggacgagaaacggttccccctgactccctgttgtcaaaatcgccagttcttcgtcccggtattttgaaatttgctgcagtgggataatgaggtcatctgtccgggcctgcaagtatcccaattttaatgcgattttaaatactttttcaagataatttccgacaaacgcaactttgcggccggtagtagaagccgcatcgagcacttgctgcactctgattaagttcgaggcaaagctcgcgataataatccggccctttgcatcgtagaaagcatccgtaatttcttccgccacaacagactcatgggtcgtatatcccggatgttccgcttccgtgctgtcggatagtaacaggagcacgccttcttcgccgatttttgacatttttccgatttccgaacgataatgcccgcccatttcctggtcaaatttaaaatcgccggtatacacaatattgccttccgatgtggaaatgcaaatgccgatcgagtcgggaatgctgtgtgttgttttgaaaaagtaaatatctgcagcatcaaaatggagaaccgtatcggcatcaatttccttaaagcggatatgctttttcacttttagttccttcaatttttctttcgccagcgcgatggtaaactttgtggcaaacaccggcacgttgagtttcatcaggatatatggcagggcgccgatcgcgtcctcatgcccgtgtgtcaggaaaattccctttatccgctgcctgttttccattaaataagtaaaatccgggatgacaatatcgatcccgagcatttcgtcttccggcagcatcagcccggcatcaagcacaaacaggtcttctccggtttccacaacgtacatattctttccgatttcaccaattcctcctaaaggaatgaccttaatggtttcgtttttttccttacgcaaaattcttttcctcctgtgttgtttgaaattctagagcaggaatcacgtttctttttgatagatcgcaaggggttgccggattccatccgatacggccttacgcatatccaagttcccggcataaaaaataagcggccggctcttccgccgcatcccttttaaaacgccatgcctggcaccaggcgcccgcacgtccacttgcaccgtcccggttctatcgaaaaagactttccgagcctgtaaaaataaattgctgtccgttcctttctcttatgtatagcttaaccgaaaagggtatatccggtcaatgaagagagcgtgatatttccatcgacaaatgctgcctatttccgccaatctgctgtttgccagcagattggcgggagagggcctgctttttttccctggagccggcatgggggctttcttcaaaacccgcttaagcaaaaaaacgaccctgtccgtttttccggaagggccgtttttttgcttaaagatcgccaagcaggtggtgaatggtttcccgttcttcttttgttaacggaacgagtgggaggcggacgccgccggcatccatcccttttaattgcaaagcggttttgaccggtgccggattaggcgccataaacaaaccgcgcattaatggaagcagcttttggtgcagccttgccgcttttgttacatccccggcaaaaaaggcttgcaccatttcctgtatggccgggccggcaacatgggaagcaaccgaaatcacacccgccccgccgattgaaagcacgggaatcgtcaggccgtcatccccgcagtataattcaaaatcatccggcgtacgggcaatgatttgcgccatcgcatccaaattcccgcttgcttcttttaccgcaacaatattcgggattttggaaagttcgatgatcgtttccggttcaatattgacagccgaccggcccgggatattataaatgacaaccgggaggctggtggattccgcaatcgctttgaaatgggcgtacatgccggcctggttcggtttgttgtaatacgggccgacagccatgacggcatcaacgccgcatgattccgcacgcttcgtcaattcgatcgaagcatacgtgttattgctccctgttccagcaatgaccggcacccgcccgtttgacgttttcacaacctgcttgaacagcgcggttttttcttcaggcgaaagtgtcggggattcccccgttgttcccgcaacgaccaaagattctgtcccgttttcaattaaataatcaaccagctttgccaccttttgcaaatctagattccctttatggtcaaaaggcgtcaccattgccgttgaaacttttccgaaacgactcatacttacactcctcatcctgccgggttttgcaagatgaaaaataaaaacacccggcagaaaatctttcattttttacgcatgaatatcatacgtttccgtttcgctttctaaactaaaggcatcatgaagggcattgaccgctgtaacgagatcttcctgcttcaccagcacccagatggtcgtgtggctgtcagcagactgtaaaatccggatccctttttcggaaagcgccgacacgattttatacgtaatgcccggcacgcccgcaatcccggcaccgacaattgatactttggcgcagttccgttcaattgccggttcatgccccagttttttcagcactgcttcagcccggtttgccacttctccggaaaccgtgtagacaacgcttgtcggggaaatattgataaaatcgacactgatattttcagctgccatcgctttaaacacaaccgtctgcaaatcatactgcccgtcttttgcatatactttgatctgcgaaacattcggtacatgcgcaatcccggtaacggtgcgttcttttatatcggtcccgagtttctggcggtggcttaaagatgtgacaagcgtaccgatatcgtcggaataagtggaccggatgcggattggcacttttgactgcatcgcgatttcaacggcgcgcgggtggatcacttttgcgccctggtaagccatattgcagacctcgttatacgtgaccacctgaagcttccgcgcattttcggcaatccgcgggtcagctgtcatgatgccttccacatcggtaaaaatatcaatccactccgcttgaagcgcagcaccgagcgctgcagcggatgtgtcgctgcccccgcgcccgagcgtggttacgtccccgttttttgcggccccctgaaatcctgcaaccacgacaacatcgtgcagtttcagttcacgcaggacgcggtcgcacttcatgtccgtaattttcgcattggtatgctccgcgttcgtgcggaaaccggcttgcgcgccggtcagggcgcaagcgctgatgccgtgcgcgtttaacatattggcaaacacaaggctggagataatttcgccggttgacaacagcaaatcctgctctcgtctgtttaaacaggtttcggacccgccaacgagcgacaggagcgtatcggttgcatacggttcccctttgcggcccatcgccgaaacgacggcaaccaccttatagccttcttccagtgctttttctacatgatgtttggcatgcattcttgcatcatgatcccgtacggatgtgccgccaaatttttggacaacgattttcaatgaagaacacctctgttataaactgataaataagaacagtgattccggtaacgagcgggctttgccggccggttttttgccaaagccatgtttaaagggccggccgtttttaaaccgttcccttcccggccggaaaaagccgcggcatattttttggcatacgtgtccataaaatatatcgggaaatggaaccctctccgattaccggattccggcataaacttcgctttccctatatcttatcaccaatattgcaaaaaggtcagcctaaattgccccccaatcagatgagccccatcctaatcaggctttccgcaatctggatggaatttgaggcagcgcctttcagcaaattatcggaaacaacccacatatggaatccgttgtcttcatccgggtctttgcggatccgcccgacaaaagtgtcatacttgccgaccgcattgacagccatcgggtaaatctgttcttcggggcgatcttccagcacaacaccgggcgcagacgcgagcacttcccggatctgaccggcacttgtgccgcccttttcggtttcaaaataaacagattccgagtggccggttgcaacaggaatccggacgcatgtggcggaaacttttaattccggcatatgcatgatttttttcgtttcattgatcattttcatttcttcaaatgtaaagccgttgtccgtaaacacatcgatttgcgggatggcattaaacgcaatctggtaatgcttcttgtcgccctttaccggcagtacctgcggctcgtaagcccgcccttcaatgagcgccttcgtctcgtcgttcagctcccggatggcagccgcgcccgaaccggagacagcctggtatgtggaaacgagcacccgcttcaggccgaaatttttgcggacgggttccaacgcaacaaccatctggatcgtcgaacagttcggattggcgataatgccgttatgtttttgaatgtcttcttcgtttacttccgggaccacaagcggcacttccgggtccatgcggaaggcgctcgtattatcgattacaattgccccgcgtttcaccgcttccggcgcaaactttttcgacacgcccccgcctgcgctgaaaagggcgatatccacgccttcaaagctttccggcaccgcttcccggaccgtgatttcttccccgtttaccgttatttttttgccggcggaacgcgaagatgacagcagcgtcaatttgttatacggaaatttgcggtttaccaaagttttaatcatttgctggccgacagcgccggttgccccgacaacggctacgtgataacctgatgtgtttgccattggcgtattccccttccaattccaaaaccaaattcatttttatagctattattgtatcacaagtcttccggcaccgtgtgtattttttaaattttaaatcgttttcaaggcgattttccgtcgcggaaacgttcgacaatgacaggctggatttgtttcccctcgagtgcaagcgaaaccgtatcggcaagggcagtcattctcgccaccattgaatttggtttgttgtccgggtcgtcctgcccgtacggaataaaataaatattttttgttgccatcagccgcatcaaattcacgccgtttaatccgagcgcatcattggtcgaaatgccgagcacaaccggtttcaaattgcggagcgtcgctttggcggccatcagcaccggggaatccgtgagcgcgttcgccagtttgctcatcgtaaatccggtcaggggcgcaatcaccatgcagtcgagcgggagggttggcccgagcggctcggcctcgacaatcgaatcaatcgctttttgcccggtgcatttttcaattttttccacccattctgagccttttccgaatcttgtatccgtcgttttcaccgtgtgcgtgaccaccgggataacttccgcccccaatgccacaagcttttcgatttcaggaaaaacggccgcataagtgcaatgggagccggttaagccgaagccgattctttttccctttacatccatggcgatgacccctttctttttaaaacgtcttcttcaatcagccggccgagcacattcccgagtatccgcccggctgttttcggcgcgacaatgccaggcaggctcggcgccagcattgctttaatgccgcgcttttcggcataccggaaatccgttccgcccggtttggaagcaatatccagaatgagcgtatgcgaaggcatcttttggataacggatgcgttcacaatcaggtgcggaaccgtattaatgcagatgtcaatgtcttttacttcctgttcaagatcgtttaaatgaaaaggcacaagtcccatctccgttatcctcgcaagatgttcgctttttctcgcgccgactttcaccttcgcgccgagatggcggaaagcccgggcaacgctcattcccaccctgccaaggccgaggacggcaacatttgagccgtgaatcgtaaattccgtgttctgaatgaccatcatgatcgttccttcgacggtcggaatcgaattatagattgccacatcgtcccgctcgaatagtttcacaaggcggcggcccgcttttttagcaatttgttccaaatacggattgctgatgccggtatagatcgtaaaataaggcggcgtttcagccagcatatcaccggtcagcacaacttcttcgttcgaaaaaatcaaatcgattttcccgtcgtccgctgtcccggtaatcggcaaaatgacgcaatccatttccgaaaaccggatatctttaaatttttctttcgtgacgccggaatacacaaaatcgagctgttcaaatccgatcaatgaaattttcgcatcgagatccgcaagtttccggatcacttccagctggcgtgcatctccgcctatgatggcaatttggacgccggtcaacaaatgcctcaccttcttttccatgtgcatgggggattccccatatcttatggcggcagcatgttttttgtgaaaaaaggcaaagaaaaatgccggggcacccggcatgcttctttgcctttttaatagctgtactggttttcaggcacttccaaaatcatcatatcggcaccaatcgttctgatccggttccacgggacacggatctcgttcgcctgttttttaaaccgccttccgaccgggatgatcagggcctccacttttccgctcgcttcatcaatttcaaggtccgtggagcccaataccccgagccgttccgcttttttaaaatcaaccatttcttttccgctgagttcgctgagccgcatattcccccttctttctctcatggactgattccattttatgcgggggatggaaaagatatgccgtttttaagacaaccgctccggcaattttccgtccgggctgattaaagaggccgaatacggtttggagaaaatctcccgcgcacaggcattgactttttccacggtgacgcggtcgatttcctcgagcatttcatcaagcgaacggtgcttctttaacagcagttcgttctttccgttccggctcatgcggctgtttgtgctctccaggctgagcatgaggctcccttttaactgttctttgcagattcgcacttctttttctgttaccccttttgctttcaacgtctgcagcgtctcctgtaccgtctcaaacagctcgtccaattgggaggcgcccgttccgccgtaaatcgttaaaatgccgctgtccttataggcggtatggtaggaatacaccgaatatgcaagcccccgctgttcccgcacattttggaaaaggcgggaggacatgctgccgcctaatatattattcaggacaatcagctcataaatatcgtcactgccgattttcttcccctcaaatccgaggcagagatgggcctgttctgtttcttttttgcgtgcaaggtcattcgtatgaaaaacggccgtttcgccgcccgtctctgccttcccgccttcataggagccgaacaaggcttcaatctcccttacgaaagacggcggcacattgccggcaacggagacgacaacgcggtcaggggtatacatatcatatacatactgatggagatcgtcgctcgtaaacgatgcaagcgtttcttccgtccctaaaatcggatagccgagcggatggttttcataaatggccttgccaagcaaatcgtggacaatatcgtccggcgtatcttcatacattttgatttcttcattgacaacgcttttttcccgttccatttcttcttctgaaaaagtggagtggaaaaacatgtccgacagaatgtcaagcgcgagcggcgcgtgcgtgtcgagcactttcgcataaaagcatgtatattctttcgacgtaaaagcattcacccggccgccaatggcatcaaaggcctcggcaatgtcttttgcgctccttttttctgtccctttgaaaaacatatgctcaagaaaatgggaaatgccgttgtttttttcattttcatttctcgaaccggtgccgatccaaatgccgatcgcaaccgaacggacagttggaatttcttccagtacaatccttaagccgttattgcaagtatatttttgtatcatgttgtgcctcctcgaaagtctcatttcactctgtgccgtcttttgtatcagcgggatccttttcgctgtctaaaaacgttccgtcctcatttttaatgattctttcctcatcgagcaattttgtaacggtcccgatttgtaaatttttcttttccagcttgacaatcaacggttccaatgcttttgctgtggaagcggtcggatgcattaaaataagcgaaccgccctgtgcttttgcgattacgcgctctacaatcgcccctggggaggggttttgccagtcgaccgtatcgaccgtccacatgatcgtttccattcccattgattttgcgatgcttaccgcttcatcccggtaactgccgctcggcggggcaaaccacttcactttttcttccgtaatcgcttcaagcacccggtttgtcttcaccagctggcttttgatctttgattccggcaaagtgctaaaatcggggtgggtataggaatggttcccggtttcatgcccgccgcttataatcatgcgggcaagctcagggttttcttttgcccatcgcccctctaagaaaaaggtagcatgaagatgatgtttttttaaagtttttagcatatccggcaaatattcatttccccatgcgacattgattaaaaaagcaaccattggtttatcgggatttcccgtatagacaggggccggatccagatctccaaggtggacggcagggggaatttgtttaaacaccagtttgcgttcgtcgtaacggccgtcctgtttcattttcaagtaagaagctttttgatccacttccaccccattgtagccggggaccgccttccaaaccctgtcaatccgggcattttccggcgggcggtaaaatcgttttgcagcctgttcaattttttcctgaagctcgttctcttgtgtgctaaaagcggcccgctcccttaaataccgggcggaaagcggatttcccgcaagcaacaatgctagaatagcaatcaagccaagcgcaatcaagcgttttgctttattcacgttattttcccccttctttaaaaaaagtatgaaatggggaaggggcatagaacgggcacgcgggacaaataaaaaaagccagggctccctgactttcatcacgatttattttcttttttttgctgctcctttaaaacggctttgcgggaaaggttgatgcgcccgtggctgtcaatatccgtcaccttgaccagaatttcatcgccgatcttgacaacatcttcgactttccggacgcgttcttcggcgagctcggaaatgtggacgaggccgtctttgccgttaaagatttccacaaaagcgccgaatttttcgatccgtttgactttgccgaggtaaaccttgccgacttcgacttcccggacgatatcttcaatcaattgcttcgctttgttgtttgcgtcttcgtccgtcgaagaaataaagatggtgccgtcctgttcaatgtcaattttcacgccggtttcgtcaatgattttattgatttgtttgccgcttggcccgatgacgtcgcggattttatccggatggattgtcatggttaaaatcttcggcgcataaacggacaaatggtcgcgtgttttcgaaatcgtcgacatcatatggtcgagaatctgcattctgccctttctcgcctgctgcagcgcctcttccagtatctccctcgacagccctgcaattttaatatccatttgcagcgcggtgacgcctttggatgtgccggccactttaaagtccatatcgccgagatggtcttccatgccctggatatcggttaaaatcgtataatgttcaccggatttcacaagtcccatcgcaatcccggcaaccggcgctttaatcggaatgccggcatccatcatcgcaagggtggaagcgcaaatgcttgcctgtgaagtggatccgttcgattccagcacctcggatacaagtcggatcgtgtacggaaattctttttcatccggaatgaccggttccagcgcacgctcgcccagtgccccgtgcccgatttcgcggcggcccggccctctcatcggcccggtttccccgacgctgaacgaagggaaattgtaatggtgcataaaccgtttcgactcttcaatgccgagcccgtccaaaatttgcacatcgcctaaagcgcctaacgtacaaatgcttaaagcctgtgtttgcccgcgagtaaacaacccggaaccgtgcgtgcgtggcaaaaccccgacttcggaggagagcggccggatttcatcgattttgcggccgtccgggcggattttatcgactgtaatcagcttgcggacttcttctttttcaatatcgtgcaaaatttgtttaacctgcttgaccgtttcttcatcggcttcttccgcttcaaaccgggtgagcacttcatcgcccacttctctgatcgcttcttcgcgcgctttcttttcatggacctggatggcttcgatcatctcatcccggcacatgccgctgactttttccaccagttcttcgtcgagttcaaacaattcgacagccattttctctttcccgatttcagccacaattttttcctggaaagcaatcaggcgcttgatttcctcatgcccgaacataatcgcttcaagcatcacttcttccggcacttctttcgcgcccgcttcgaccatattaatggcgtcttttgtgcctgcgacggttaaatggatatcgcttttttccatctgttccacagtcgggttaatgaggaacttgccgtccacccttccgacgatgacgccggcaatcgggccttcaaacggaatatcggagacggaaagcgcaagcgaagacccgagcattgctgccatttccggcgtgcagtcctggtcgacgctcatgaccatgctgacgacctgcacttcattgcggaagccgtcggcaaagagcgggcggatcggcctgtcaatcagccggcttgacaaaatggctttttcgctcgggcgcccttctcttttgataaaaccgcccggaattttcccgacagcgtaaagccgttcctcataatttacggtcagtggaaaaaagtccacatttttcggttctttagaagcggttgctgtactgaggacagccgtttcgccgtaacggacgagcgcagcaccgtttgcctgttttgcgagctgaccgatttccacggtgagcgggcggccggcccaatctatcgtataggtatgtttatcctgtaccatacagatcaaaatctcctttctttttgcatatattgtttcacattcatgaaaagataagcgcgggtaatgattcaaaaacgaaccaaccgtttgctatgtatgtacaagccgcgccggggcagtacgggaaacccggcggcaatttgaaatacatctgtcccaaaatttgagggaggaaaaacacattgcaaaaaagcgggaatactcccgctttttgcattctgcatttttttatcggcgcaagcccagccggttaatcaattcacggtaacgatgcacatctttattgcgcagataggtcaacaaattacgccgtttccctaccattttcatcaagccgcggcgtgaatggtggtcttttttatggacacgcaaatgatcgttcaatttgttgatttcttctgtcaatacagcaatttgcacttccggagaaccggtatcgttctcgtggattttaaattggttgatgatttcatttttacgttcttttgaaatcgccatcctgttcacctcctctgtttcctatcccctgttgccgagcaggcgtcggtgagtcgcgctgccaagcacaggttccggtactgtaatagaatactactttttcgcataaaactcaagtggcagttccctgtttttcaaagtaacgccttgccgccgtttcatcccgtttcatttcttcaatcaagtcctcaacgcgggcgaactttttctcttcgcggatgcgcgcaagccatttgacaactacttcttccccgtaaatggtgtcggaaaaatcaagcagatacacttctgtcgttttttcatattcttccggatttttaaacgtaggattgtagccgacgctgcataagccgttatgccatgtatctgcgactttcatttgcacaatgtataccccgttcggcggcagcatatacggcgcggtgagctgtagatttgccgtcgggaatccgagctgccggccccgtttttcgccatggacgacgatgcctttgatctcgtaatcgcgcccgagcagcggcttcacttccccgacttttccttccctgatttttgaccggatcagggtggagctgactttttccccggtattttcaagggccagtttttcgatcaccgtaatcccgaacctgccgtttgcatattcagggagattctccatattgcctttcccaaatttgccgtatgtataatcgaaaccggcaacaacatgtttcacgccgagtgcggccagatactggtcgacaaattgctgcggcaaaagagatgcaaaacgggaggtaaaacggacgacaaacaggtaatcgacgcccagtttttcgattagcttgatcttgtcttcaagcggtgtaatcagttcaatgccatcctttttctttcccagtacaacggaaggatggggttcaaatgtcatgacggcactcttccatccgtttttttcagcgatcccgcgggctgttttgatcactttctgatgcccgagatggatgccgtcaaaataacccaatgcgatggcaagcggcggaaaatcgccgggcttaaaggaatggggatgatggaccgttatagttttcaaaatttctcaccttttcccttttacaaattgaagcagccgccttcccgttttatacccggaaggctttttacaacactttcgccggtttgataaagccgggccggccgggatacgccacgtataccgcgagcatttttccgcggaaaaagacagcaagcctgtctcccgtttccggccaagtctccggttttttcaacacggcaccgttctttactttctctgctaatgtatcactaatttcccatttcggcaaatggcggatcccggcctccagcgggaagagcaggctttccttgatgcctgtttccacggctttttcgatctcctgaaatgtggcgcattgttcctttgaaaaaccgccggcttccgttcttgtaagattggacatatgtgcgggatagccgagcttttccccgatcataacagcaagcgtgcggatatacgtccctttgctgcatgaagcgcggaaacggaacgatacaaccggcccttcaaaacactcccgcccgtccaatagttcaaggctgtagatttccacatcccttttagggcgttccacttcgatgcccgcccgcgcatattcatacagccttctcccgttcactttgacggcggaaaacatcggcgggatttgggtaatatgcccggtaagcgaagcgagtgcggctaaaatttcttcccggctgatcggacggccaatttcttttttttcaatgatgtcgccggaagcatcctctgtcgtcgttgaaaccccgatcgttgcttcgccttcgtaagttttgccggcatcctgaagatattcggcaatctttgtcgcacgcccgatgcaaaccgggagcaccccttccacatccggatcaagcgtgccggtatggcctgctttttttgtgccgaaaagcttccggattttaaaaacacagtcatgggaggtcatccccgccggtttccagagcggtaaaataccatccatggcgccacttcctttcgcaaatccaataaaatcaccctaaaaaaggaaactgaccggaccgtgtcccggccccgatcagtttcctgaaacattcattcatccgtgtcatggattttttttatcagcgtctcaatgcggttgccgtattcgatggattcatcgatttcaaaaatcagttcaggtgttttgcggagccggattcttttgccaacttccgagcggataaagcctttcgctttttccaggccgtcaagagtgtctttcttttgttcctcatcgccaaggacggtcagatacacttttgcctgctgaagatcgcctgttacttccacatcggttacagtgacaaagccgacacgcggatctttcagttttcgtccgataatgtcgctcagctcttttttcatttgctcgccaaccctgtttgcacgaagattcatcactcacacctcatttatagccattcaatatttgtttcaagccgttcccattcaggaaaggaatccagaaactgaattgcccgctgcaattctctttcagccgccgcccggctcgaagcaacggtcacgacttcaacgagggtccgctgccagatatcctggaaatccatttcaccggctgcaacgttatatttttgcttcagccgcgtcaatattctttgcagcactgcccttttttctttcaatgaacgggcatcgtaaatgcggaattcgcaacgggcgctcccaatcatgctctttcaatttcctccatgataaaggactcaatgacatctccttctttgatgtcattaaagtttttaatcgtaatcccgcattcatatccctggttgacttctttcacgtcatctttatagcgtttcagcgtatcaattacaccttcataaatgaccacgccgtcacggatgacgcgcacaccgctgtcacgggtgatttttccgtctgtgacatagccgcccgcaatcgtgccgatccgtgatactttaaatgtctgccgcacttcaacctggccgatgattttttctttgtattccggatcaagcatgcctttcatcgcagattcaatttcttcgatcgctttatagatgatgcggtgcaggcggatatccactttttccgtttcggctgcgcgtttggcgttgttatccgggcggacgttaaagccgataataatcgcattggaagcggaagcaagcgtcacatcggattcattaatggcgccgacgcctgtatggatgacgttaatgttgacgccctccacatcaatcttttgcaaagcgtcggtcaatgcttccacggaaccttgcacatccgctttgacaatcacatttaattctttcatttccccgtgcttcatttgctcaaacagcgtgtcgaggctgacacgcgcggtttcgttgcggtgcgcctggacagcctgttgtttccgtgcttccccgacctggcgggctgttttctcatcttcaaagacaacaaaacggtcgccggcttccggcacatcatttaaaccggtaatttcaacaggcgtggacggccctgcttcttttacgcggcggccaagatcattgaccatcgcacggacgcgcccgtaagtgtggccgacgacaatcgggtcgccgatgcgcaaggtgccgttttgcacgagcaaagtggcaaccgggcccctgcccttatcgaggcgcgcttcaatgaccgagccgagtgcgcggcggttcgggtttgctttcagttcttccacttcgctgacaagcaaaatcatttcaagcagattgtcaatcccttcgccggttagcgcggaaatcgggacaaaaatcgtatccccgccccagtcttccggaaccagattgtattccgtcagttcctgcatgacccgttcggggttcgctgtcggtttatcaattttattgaccgcaacaatgatcggcacgccggctgcttttgcgtggttaatggcttccactgtttgcggcttcacgccgtcatccgccgcgacaacaagcacggtaatgtccgtcacctgcgccccccgcgcacgcatcgttgtaaatgcttcatgccccggggtgtctaaaaatgtaatctttttgccgcctactttcacctggtatgcaccgatatgctgggtaatcccgcctgcttctccggcggtgacttttgtatggcggatgaaatcgagcgttgtcgttttcccatggtcaacatggcccataatggtgacaaccggcgggcggacttcgaggtcttcttcacggtcttccgtaaaatacgtttccagatccgtctggtcaacgatcacttcttcttccacttcaacaccgtattccgaagcaatcagttcaatggcatctttgtcaagctgctggttgatcgttgccacaacgccgagcaggaacagttttttaatgatttcggaaggttccctgtagagcttcttcgcaagttccgcaacggtcagcgattctgtgaacgtaattttttcaggcagttcttttaccttttggaccggttgcggctgcggtttgaagtttttatttttccggttatttttcttttgtttgttgaacggccgtccattgttgccgcggtttccgttattgccgcggtttccgttgccgccgtttcggttattcccgttgctccggctgtttccgctgttcccgctattccggttgttgcccgcggcctggctgtttccgttattccggttgttgcccgcggcctggccgtttccgttattccggttgttgcttgcggcctggccgttcccgttactccggttgttgcttgcggtttggccgttcccgttattccggttgttgcttgcggtttggccgtttccgttattccggttgttgccgcccgtgcggttattgccgcccgttccgctcctcccatcgctgcggttgctgccgccagcacggttattgctattatttctgctgtttccactgttcccttggtttttgctgttttggccgtttccgtttgcccggttctcgccggttccgcgattttgcttctggttttcgtgccgggtgcggttttcaggtttgtttccttgccggtccccattttcggtcctggtacttctttcttttccgtacggaccgttttgcccgtttttcttgccatcttgctgtttgttgccgctgtaaaccgaatccagcttccttactgtttccccatcgatcattgacatatgattggatacctctatattcatttgttttagtttcgtgataatttccttgcttgatgtatgatgagctttcgcatattcgtaaacacgtattttgctcatgtcgtcacccccacctatgattcatcgagcagttcagcaagtttttccgcaaatccgcggtcacttactgcaactgcgactctcgcctctttcccaatggcttttcctagcatttccctcgtctctatccaccgtacaggcacatgatagaaacggcatttgtctaacatcttttttgacgtattggatgaggcatcttttgaaagcaatacaagttttgcctggcctgcccggatttctttcaggacaggctcctctcccgaaacaatctttcctgccttgaacgcaaggcctaaaagggacatcgcctgcttcccgttcatgatttttgtttattctcctttttttccttttgaataaacgccatgatttcatcgtaaaaagcatcgtctatagcggcaccaagatgggatgagagaatatcttttttctttgccaaaagcaccgcttcctcgtcttttgaaagataggcgcctcttcctgactttttcccggtcgggtcaatcgaaacatcgccttccttggaacggacgatacggaccatttctttttttggtttcatttctcccgttgccacgcattttctcatcggaattttcttacgtgtcgccatcagccccactccttattcgatctcttcatctttcccgccgttttcaggcagatccgcttctttcgcatccggtacggccagtgcttcgggagtacggcctggatcgccatcttcaaaaagctccggtccttctccgtcgatatcaccggcagtttcagaacgaggataaatgcctaaaccccttgcatccgtttcgctcttaatatcaattttccagcctgtgagtttcgcggcaagccgggcgttttggccgcgtttcccgattgcaagcgacaactggtaatccggaacgatgaccgttgtagccttattattttcatcaacaagcacatcaagcacttttgcagggcttaacgcgtttgctacaaatttagacggatcatccgaccattttacaatatcaatcttttccccgtgtagttcatttacaatcgcctggacgcgttgccctttaggcccgacgcatgcgccgacaggatcaacttccgggcggtcagtgtaaaccgaaattttcgaacggtcccctgcttcgcgggcgatcgaacggatttccacgatgccatcgtatatttccggcacttcaagttcaaacagccgttttaaaaggccgggatgggtgcgcgagacaaaaatttgcggcccctttgttgtccgttccacttttgtaatgtagaccttaatccggtcatgcgggttatacgtttcattcggggattgttcccccggcggcagcagcgcttctgtttttccgaggctgacatacgtaaaacgcggatctttccgctgcacaatcccggtcatgacctcgtcttcacggtcgataaattcattgtaaatgattccccgttccgcttcccggacgcgctgcgtgacaacctgtttcgctgtctgtgcggcgatccggccaaaatctttcggcgtgacttccaattcgacaacatcgccgatttcataagacggattgattttctgggcatcttcaagcgagatttcaaggcgcgggtcaaatacttcttcaaccacgtctttgcgtgcgaatacacggatcgtcccgttcgccagatttaaatccgtccttacattctgtgcctggttaaaattgcggcggtatgccgatacaagcgcggcttcgatggcttcaacgagcacatcccgcgaaattcctttttctttttcgagtatcgtaagcgcatctaccagttctgagctcatggaaattggatcccccttcattttttgaaaaatgatgcatttttaaaattcaacggcaagccgtgcgttggcaactttgtcatacggaatttccttctcgattttcttcgttttcactttacattctaatgttaagtacccgttgtgaaaagcaatcaattttccctggaacgttttctccccgtcaagcggttcatacgttttcacgaggacggtccggccgacagcacgttcaaaatcacgcgctttttttaacgggcgttccgcacccggagaggaaacctcaaggaaataattatggggaatcgggtccgcttcatcgagcttttccccgagccgttcgctgacgagcccgcattcttcgatatcgaccccgttttccttgtcaatatacacgcgaagaaaccagttttttccttctttgacgtattcgatatcaacaagttcaaggccgagcccttccacaaccggggatgccagttgttccaccacttcaacgactttactcatgctgacctcctcaaaaatccgatttaaaacacgaaagagcggggtgatggccccactctttcgcacgagcgtttatccgtagtatttccataaaaaactataccataacaggcaaaaaaaagcaaacagcgggctttaacccgtatttagaaaagcgacagctggttctgctccggcagcgactcgaggcagccgtgcccgtcaaggtattccataatcgttttggagacttttccgcggcgctgcaagtcttcttttgaaaggaattcgccttcttcgcgcgctttgacgatattgaccgcagcgtttgtgccaagccccggaatcgcattaaacggcgggatgagcgaatcgccgtcaatgacaaacttgtctgcttccgaccggtacaaatcaatcggctggaagcggaagccgcgcgccgtcatttcaagcgccagttccagcacggtcagcaaacttttctctttcgccgatgcgtccatcccttttgcattaatttcactgatttttgccttgatggaattcgagccgtggatcattacatccagatcgaaatcctccgcgcgcaccgtaaaatacgtcgcatagtagatcagcggatggtacaccttgaagtaagcgatccttaccgccatcagcacataggcggtggcgtgggctttcgggaacatgtatttaatctttttgcacgattcaatataccatttcggcacgttttgcttgatcatttcctcttccatttcaggcgtgagccctttccccttccgtaccgattccataattttaaaagcaagggacggctctaagccctgatagattaaataaaccataatatcgtcgcggcagccgatcacttcaggcagggtgcaggtgccgttttggatcagttcctgggcgttgccgagccatacgtccgtcccgtgcgaaagccctgaaatctgaaccagttccgcaaaagtcgtcggttttgtatcttccagcatctggcgcacaaactttgtgccaaattccgggatgccaagcgtaccggttttgcacataatttgctcttccgtaaccccgagcggttccggcccgctgaaaattttcatcacttccgggtcatcggtcgggatcgttttcgggtcaatcccgcttaagtcctggagcatgcggatgacggtcggatcatcgtgcccgagtatatcaagcttcaaaatattatcgtggatcgagtggaaatcaaaatgcgttgtccgccattccgaattgtgatcgtccgccggatactggatcggcgtaaaatcgtatatatccatataatccggcacgacaataatgccgcccggatgctggccggtcgtccgttttaccccggtgcagccctggacaagccggtcaatttccgcgctccggaatgtcaaattgtggtcctgggcatacccttttacatagccgtaagccgttttttccgcaactgtgccaatcgtgccggcgcggtatacatactcttcgccgaacagcacttttgtataggcgtgggcgcgcggctggtaatcgccggagaagttcaggtcaatatccggcaccttgtcccctttaaatccaaggaacgtttcaaacggaatatcatggccgtcctttttgtattttgccccgcattccgggcagtttttatccggcaggtcaaaaccggaaccgaccgaaccgtcattgaaaaactcggaatgcttgcagttcgggcacacataatgcggcgggagcgggttgacttcggtgatttccgtcatcgttgcgacaagcgaagaaccgacagacccccgcgaaccgacaaggtaaccgtcattcaatgatttcttgacaagtttatgggcaatcagataaatgaccgcaaatccgtggccgataatgcttttcagctctttttcaagccgtgcttcgacaatttcgggaagcgggtccccgtaaatcatcttcgcgcgcttatagctttgctcgcggatttcttcttccgccccttcaattttcggcgtgtacagctcgtcttttaccggcttgacgtcctcgattaagccggcaattttatttgtgttttcaaccacaatttcttttgccttttcgtcgcctaaaaacgagaagcatgcaagcatttcatccgttgtgcggaaatgcacgtcaggcagccggtgccgattcagcgaattggcgccgccctgggagctgatcaggattttccggtaaattttgtcttcggggtttaaataatggacattgcctgttgcgacaaccggcagattcaatttttccccgagccggacgattttcgtaatgatttcttcaagcgccctttcgtcccttatcaattcctggtcgatcagcggggcgtacacttctttcggatgaacttcaaggtaatcataaaagcgggccatctcctctacttccgccggatctttctgcatcatgccttcaaatacttcgcctttgtcacagccggacccgacgagaatgccttcccggtacttttgcagctcggaacgcggaatgcgcggcacacggtaaaagtaatcgatatgggacagggaaatcagtttaaataaatttttcaggccttcctgcgtccggacaagcaacgtacagtgcgacgggcgtgcccgcttgtacgcgccgccttcgcccatatactggttcagttcgtcatggtatgtgatcccccggttgcgggcgtcattcagcatttttaaaaagatatgtcctgttgcttccgtgtcatagatcgcgcggtggtgctgggtcagttccacattgaactttttcgcgagcgtgttcagccggtagtttttgaaatccggatataaaaaccgcccgagttcaagcgtatcaatgacgggattattggatttcggcagcccggcttttttcaggccgacatttaaaaacccggtgtcgaacgaagcattgtgggcaacaagcaccgcgtcgccaatccattcaatgtattctttcaacacttcggaaatgtccggcgcatctttcaacatatcgtcggtaatatgggtcagctcaataatcgtattggacagcgggtgcccgggattggcaaaccgttcaaacgtatcgaccacttcgccgtcccggattttaaccgcggcgatttcgatgatcgtatcataaacagcagataatcccgttgtttcgacgtcaaagacgacataagtcgcttcatcaagatggacgtgcgcatcattataggcaatcggcaccccgtcgtcgacaagattggcttcaacaccgaagataacttttatgccattctttttgccggcgctgtatgcttccggaaaactttgcgcaacggcgtggtctgtaatcgcaatcgccggatggccccattttttcgcctgggcgacaagggcagacgcagaagtgaccgcatccatctggctcatcggcgtatggagatggagttcgacccgcttctcattttccggcgcatggtctttccggacgcgcggggccacttcagaaagatcgttagcgatcatgaccagatcacggacaaacgtatcattctggatgctgccgcgcgcacggagccacatcccttttttcacgcgggcaaattgtgcggcatcttccttatcccgcgaaaacatcttcacgagaatggagcttgtataatcggtgatttttaacgtcaaaagcgtccgcccgctgcgcagttctttcgtttcgacatcaaacacatagccttccaccgtaatccgccgttcttcatcgacaatctcggaaaggcggcggatatcatcatcgggcggaattctcagcccgatcataagcggtcctgcatcgtgcgtttcttccccgccctgttgctcattcacgtgcttctgcatttcgagaacggcctgttttgcccgttcttcatcttcttttttcttttcttccataaatttggcgtatgcttcgcttgcttcaggcgccgtcgaaatttccgtgtcaaacatcaatttcggaaaaccggcccgttcgtaaaaacggataatccattccccgtatttttgttttagtgctgctgcttccggttcattgcggccggttaccaccagcttattgccggaaagtgacggaacctgatccgcaagcagggacaaaagcatcggcgacatgccttccagttctccaaggcaagttttccagtaatcggcaatcagtgccggcccaaaagaagggtctttcgcccggattgaaaaacggacgtcggcaatatgctgaaaagcctggcgcaaacgggttgtaaatgtcagatatacctcaaaaggaagaattttttcgagcaaaaaataaaaatgccatcgccttgactggcgttccacaacaagtttttcaatttccccatatttaaaatgctcgtaaaacctgtcatccagcagttccagctgccggagcaaaatctggaacctttctttctttccggcgggattttcaatcatcttgtcctctcccatcctttttcattcaatctatctttatcttaaaaaacaagcgtcctgaatgcaatctttccgggatttttcccggtagtgttgaaaggttcgagtgccgggattttccaaataaaacattttctgcctcttttttgcaggaaaagaagagaagcaccggccggtcagccgatgcccctgtcatgaagcaagttctgctaaaatattggaaagtgtttcagccaaatcctcttttttcacttcgagcacttccccggtttttctgattttcacttcgacgattgcctcagccgcttttttcccgacggttacccggacaggcaggccaatcaggtcggaatctgcaaatttcacacccgggcgctcgtttctgtcatccatcaagacggtaaactgtttttcaagttccgcatggagcgtttctgcaagggcggcttgttgggcatccttcatatttaccggcacgagatgcacgtcaaacggcgccagattgacaggccaaacgagccctttatcatcgttatgctgttcgcacactgctgttaaagtgcgggagacgccgatcccgtaacagcccatcagcatgacctgttccctgccgttttcgtctaaaaaggcggcgtgcattgcctcgctgtattttgtgccgagtttgaaaatatgcccgacttctatgccgcgcgcaaaccggatcgttccctttccgtccggggacgggtcgccttcctgaatattgcggagatccccgtataaatcgacgcggtaatccctccccggattcgcattcacatagtggaagtcattctcattggcgccgcaaatgccgtttaccacataacggacggcgttatcggccaaaatccggatcttctccggcgcgccgacagggccgagcgaaccgggatccgcccccatgatcgacttgatggcttccggatctgccatttcaatcgtttcagaaccgagaaggtgtttgaccttgacttcatttacgtcatgatcgcccctgaccagcacgattacatattcgtcgtccgctttcagcacgagggttttcaggcatttttcaggatctgcctgcaggaagtccgcaatttgcgcgatcgttctttgcccaggggtcggaattttttcgagcggtttttccgcttcatccggctttgtgtaaacggtcttcacttccgccatttcaatattcgccgcataatcggatgaatcggaatacgcaatggtgtcttccccgatttcagacagcaccatgaactcctgcgtatctttcccgccgatcgcgcccgagtccgccaatacggcacgaaaatccagtttgcaccgcgagaaaatattggtataggcccggtacatatccttatacgtctcatcgaggctctcttgattggcgtggaaagaatacgcgtctttcatgatgaattcccgcccgcgcagcaagccgaaacgcgggcgcttttcatcccggaatttcgtttggatttggtataaagaaagcggcaggcgtttatacgattttacttcgttccgaattaaacttgtgatcacttcttcatgcgtcggcccgagcgcaaagtctcgttcatgccggtccctaaggcgcatcagatccgggccgtaagaataccagcgccccgattcctgccacaattccgccggctggagggacggcatcagcaattccatggaaccgatggcttccaattcttcacggataatcgcttcaattttatgtaagacttttttcgcgagcggcaaatacgtataaacgccgcttgcaatttgccgtatgtacccggcacggagcagcagctgatggcttttcacctcggcttcggccggtacgtcccgcaatgtcggaataaacaatttgctctgtttcatacatcgcactcccgtattcttttattatagatcagttgagtttgtaacgtttatttgtttctattccccgattcagcaaaccaggcccggggttggatgatgagagattgtaaatgaaaagccaggccagggtgcgtaaaaatgcagattttaaaagtaatccagccgctacaaattgaacgaagatttggcgctgcttgtgaaaacgggcgggccaaaccgggctgatggtggaccagcaattcaagtccattttataaccacatccgtaaagcaaacaaatttacggaggaagcaggcccttttgcaacagggcccgccggaaccccctgcaaaccggaagctttacaagaaaaatctttggatatcattccaggtgacaatgatcatcaacagcatcaggagcgcaaaaccgataaaatggacgatgccttctttttgccggtcaatcggtttgccccgcaatgcttcgattccgaaaaacagcagcctgcctccgtctaaagccggcagcgggagcaggttcataatcccgatgttgatgctcaacaatcctgcccatttaaacaaatagatgatgcccgacttggcgacggtctctgttgatttataaatgccgacagggcctgacagcatatcaatggaaaagccgccgctgatcaggtggccaagcagtttaaaaatttccaccgtccagacgtatgtctgtgtaatgccgtacgtggcaactttcagcggggaatggtcaaccgggctgttcacgccgattctcccgaatgttttcccgtcctctgaaatgctttttggcgtcaccggaatgtccattgttttgccgttccgttccactgtaaacgtgattttttcatcagggtgtttttggatgacgtcgacaatgtcattccacgtcgagatttccgcaccgtcaatactgatcaccgtatcccctttatggagcccggcctttgccgcagcactgtcctttacaacggttccgagcactggatcggtcatcggcaccccctgcaccaccgccataagggtaaagacaagggctgccaggacgaaattcatgagtggcccggcaaaaatcgtgagcgcccgcttcccaagcgatttggaggcaaactggcggtcccacggcgcgatttgcatttccatccggtcttcgacaagcacggcatcccttttcactttaaacgtccggaggtgttcatcatcgccttcttcatagcctttgattacaagcgcacgttccagatctgcagattccgtttcaatcatgcgcaatccagtataccggtcttttccgttcaccacgattttttcaacggcttcgttttcatcgaaaagcagcccaacccgctggcctggcttcaactccggcatatccgggtcttcccccgccatccgcacgtatccgccgatcggaagcaggcggatggtatactgcgtttcgtttttcttaaacgaaagaatcttcgggccgaatccgatcgcaaattcgcggcataaaatcccggctttttttgcaacaaagaaatgcccggcttcatggaaaatgacaagcgaaccaaaaatcaaaataaaggctataactgtcgtcaaatgaataccaccttactttaaaatagtctccgcctttttcaggaactccgggggaaaccccccgcttacatgagcgaagccacatagtcccgcgtctcacggtcaacggcccggatcgtttccaaatcagggtgtataattacattatgccttgcaagcgccttttcaatcaactgatcaatttgcaaaaacgcgattttttcctgcaaaaaggcatggaccgccgcttcattggccgcattcagcacggccggcatcgatccgccggcttttccggcttcataggcaagtttcaggcagtaaaatcgttcttcatccattttttcaaaatgaagccggccgatttccgccaaatggagccgctttgcatccggaagcggcagcctttttggaaacccgagcgcatattggatcgggatgcgcatatcgggcattccaagctgcgccttcacactgctgtcacggaattccacaagagagtggatgatgctttcgcggtgcaggatcgtatcaattttttcaaagggaaggccgaacagccagtgtgcttcaatgacctcgagccctttattcatcatcgttgccgaatcaaccgtgatcttggcacccatcgaccagttcggatggttcagcgcatcttttacagtgacagtttcaagctgctcccttgtataatcacggaagctgccgccggatgcggtaatgatgagccgttcgatttcattccggttttctccttgcaaacattgaaaaatggcggaatgttcactgtcaattggaagaatggcagtgccggcgcgctttgctgcatccataacgagatgtccagctgtgacgagcgtttctttattggcgattgccacggttttccccgcccggatcgcctccaaagtcggcaacagcccgacactgccaagcaccgcattgaccaaaatatccgattcggcatatactgccgtttcgaccatccctttttccccgcagagtacaaccgggctgtccccgaattcagttttcagccgggcacagtcctctttgtcagcgacagagacaagcgccggatgaaactccgaaatgattttcctcgttaagttaagatttctccctgctgaaaaagcagcgagccggaatacttccggatggttccggatcacatccagcgtttgcgtgccgatggagcccgtcgcccctaacaggctgattcgcttcaatgttttccacctctttttctatcccgccatcatttttaaaaaatggataagcgggaggacaaacaataaactgtcgaagcggtccaagatgccgccgtgaccgggcaggatctttcctgcatcttttaccccgtaatgccgtttataggcggattccaccaaatccccgatctggccgaaaacggagaggacgaccgtggacatcatgagccgccagagcccgaggccgatattggagaagaaaaaaaacagcacagcaacaacggcagcacacagcacgccgccaagcgcgccttcaaccgttttattcgggctgatctccggccacagcttatgctttccaaaagcccgcccgatgaaataagcgccggaatccgtagcccaaatgagaaacagggcgtaaagaatataggtaatgcccacatccggcgcatttctcgtttcaataaaataataaaaaccgatgccaacatagatggcggacaaaatgtggaaactcgcctgttcaaatgtaaaccggtttttcgtcaccaccatataggcgagaaaaagcagcacgatcatatacaccaattcaagcttggaaaagcctgtttgtgcgatgacatgcatatactttgatggaaataaaatcagccagagcagcaggacggaaaggatgccgccaaaggaaaacaatggctgttttcccatccgcaacagctcgtacagcgcgacggtcgccatggcatacacgagcaggacaaacggccatttcccgtatatcacaaaaggaataaaaaaagctgctgccacgatggctgtgatgattctttgtttcattcagacttctcctcactttttaaaccgccgtatcttcgggaacgtttttgatactcttcaattgcacttaaaaaatgttcctcatcaaaatccggccataacacatctgtaaatacaaactccgtatatgccagctgccataacataaaattgctgagccggatttccccgctcgtccggattaaaaggtcggggtcctgcaggccgtgcgtcattaagtactggtggaacacttcctctgtcagctcgttttcattcattataccattttttacatccattaaaatatttttcacggcgcgcataatttcatccctgctcccgtaattcaacgcaaaattgagaatcagcccgtcgttttgcgccgtttcactgatcgctttattgatggccctttgggtatggggcggaattttttctttgcaccccatcatctgcactttcacattttccgctttcagctcgggaagataagtggataaaaattcttccggcagcttcattaagtattccacttccaattttggccttttccagttttctgttgaaaaagcataaagcgtcaatactttgatcccgagccggttggcggtacgggtaattttccggacggttttcatgccttcgtgatggccggccacccgcggcaaatggcgttttttcgcccatcttccgttgccgtccatgatgatggcgacgtgttccgggatggcggcagctttcactttttcgccgcgggcgatcgtgccgcggccttctttatcgaaagatttccatctttttaaattcatatgcacatttgccctccaaatggtatccgcctgcatctccatgcacggtaccgcggccatacggtgttcagtcgtttccggcaaaagtggtatggcctttatattccatttgccaacctctattatagagaaaatggatgcgtttgtgtagttctgtttttaaatggtccggccatttggttttgtggcgtatggaaaaccggctttgtatcccattttaaagcgcgtgtgaagcccgttttcccggcagtatggcaaaggtcttttggagccggaactttccatgctcccgtgaaaacgcgcattcctgttaacataaaaaaacttccattggccgcttgccaacggaagttttttgtccggcagtcagacttccatgatttcctgctcttttgtttttgtcattttatcgattttttggatgtgctggtcggtgattttctggacgtcttccgcaaagccgcggtgctcgtcttcagtaatctcgccgtttttttcctgctttttcagctcatcattggcatcgcggcgcacattgcggatcgcaacttttgcttcttctgcttcttttttgatgagcttcaccagttcttttctccgttcttccgttaaaggcgggatggaaaggcggatcacggatccgtcattattcggcgtaaggccgagatccgattttaaaatggccttttcaatttcacccagcaccgttttatcatacggctggatcaccataaggcgcgcttccggcacggaaatggacgcaagctggtttacaggtgtcctggcgccgtagtaatctatcgtgattttatcgagcagggccgcgtttgcacgccccgcccggatggagccgagttcgcgctgaaaagcttggattgcttttgccattttatcttttgcagtgtcaatgacctgatttgccatcatattttccccctaacgattgtcccaatggtttcgcccaagacggcgcgtttgatgtttccttcctccataattgagaatactataagcgggatgtcattgtccatacataaagaggacgcagtggagtccatgacagcgaggccatctttgatgacatccagatatgaaagctcttcatatttaacagcgtctttgtccagtttcggatcagcagaataaacaccatccacattattttttgccatcaaaatgacatcggcttcaatttctgctgcacgcagcgcggcggtcgtatcggtggagaaaaacggattgccggtgccggcggcaaaaataacgacacgccctttttccagatggcggatggcccgccttctgatataaggctctgccacctggcgcatatcaatggaagtctgcacgcgtgtttccacgccgctctgttccaggctgtcctgaagggccattgcattcatgacagtggcgagcatgcccatataatcggctgttgccctgtccattcccatctggctgccgatcttgccacgccaaatattgccgccgccgacgacaatcgccacttcaacgccaagctcgacaatttcttttacttgccgtgcgacggactggatgaccgtcggatggatcccaaagccctgctctccggccaatgcctcgccacttagtttcaatacgacacgtttatatttaggggtgtccattttgaacctccaatatggttatgtaaaatttccccggtccatctttgccagtaaacggggcatttttttgcaaggttaaaatcctgctcctgccttcttttaaaaagaggaacacactgtgttcccctttttaaaactagtttttcttcacttgattcatgacttcttcagcaaagttttcctggcgtttttcaatgccttcgccgacttcataacggacaaaatctgccacttttgcgttatgggaagcgacaaactgcccaaccgtttgatccgggtttttgacaaacgcctggtctgccacacaaatttcctcgaagtatttcttcaagcgcccttccaccattttttccacaatcttttccggtttgccttcgttcagcgcctgttgttttaatacttcgcgttcatgggacacttctgcttccgaaacctggtcgcgggagatgtatttcggattcatcgctgccacgtgaagggctacgtcttttgcaacagaagcatcggttgtgccttcaagaacggtgagcacgccgatgcggccgcccatgtgaaggtattcgccgaatgcgccgttatctgttttcgttttcagggcaaaacggcggagcgaaattttttcaccgattttggaaatcgcctgtgtaataaaatcattgacagtcgatccgtttgccattgttgattgtaaagcggtatccagatcggccggtttgcttttgagcaaatgttcagcgatttcttttacaaggttttggaattctgcattttttgcaacaaagtctgtttcagcattgacttcgagaataacggcgtggttgccttcgcttaatacgtaagtggttccttctgcagcaacgcggtctgcctttttcgccgcttttgcaatccctttttcacgaagatagtccactgctttttccatatcgccgttcgtttctgtcagtgcttttttgcagtccatcatacctgcgccggttttttcacgcagttctttcaccatttgagctgtaattgccatcggatttcctccttcaggttatgtacgtctccctaaaaaaggtgataagcacaaaccttcttatcaccttttttcattgggatatttttggtaaggtgcggtgctgtcaaaccccggccggaaaacggatcaggcttcgacagtcgtttcttccgtgcccgctgcttcgccggattcagtcgaaacttcagcagcgccttcttcaccctgttttgcttccacaatggcatccgccattttgctggtcaaaagtttgactgcacggatcgcatcatcgtttgccggaatgacatagtcaatttcatccggatcgcagtttgtatccacaatcccgataatcggaatgtttaattttcttgcttccgccaccgcgatgcgttctttgcgcgggtcgatcacaaacaaagcatccggcaggttccgcatatctttaatgccgccaaggaatttcaccaaacggtcgtgttcttttttcaactggacgacttcttttttcggaaggacatcgaacgtgccgtcttcttccattttttcgatttgtttcaaacggtcaatccgtttttggatcgtttcaaagttggttaaagttccgccaagccagcggtggttcacgtaaaacatgccggaacgttctgcttcatctttaacggattcctgggcctgttttttcgtgccgacgaacagaatatttccaccgtttcctgcaagttcttttacaaagttgtaagcttcttccacttttttgaccgttttttgcaggtcaataatatagatgccgttccgctccgtgaaaatgtattttttcattttcggattccagcggcgcgtctggtggccgaaatggacaccggcttcgagcagctgtttcattgagatcactgacattttatttcctcctatggtttttttcctccgccccaatccttttcaaaaggagaccgcttaaaagcagcaccgtcctttaaatcatgaagcgtgtgtgataacaccaacgattactataacataaaaaaaaatgcgaatcaagcattatccgcgtcctgtctgaaattttagaagcagctcgatttccgtgcggcctttatttaatttttgggcaatttcatcaacagtatacccgttttgttgcaaatcattcactttttgcaaaaggcttttttcttcctgaagctgcccttcgctttgttcccctgaaatttgccgggccgcattccggtacgcccggtttgcggacgtccggatgagcgcgtccggcttcggtcccgctgtttctcctgtttcaggcggcttttttgtttctggagccggctgttccgtttccggccctgctttttccgccggcccggtctccttcatcctgcctgctttcatttttttgataaaagcatcgttttcttcttttagctccatcaggtatacggaaaagatgtcttcgatttcctttaccattttattgacgttctgttctgcccgagcaaagcggttttgccgtaaatagagcaggatgatggcaaaaatggagagcgcattaaataggaaagaaagaatgaggaaaaaaataaccgtttgattcaccccctctgattacagcaaccgtttttccaaaatattccgcagtttataaatggccttcgaatggatctgggaaatgcgggaagtggaaagccccatcacttcgccgatttctgtcagcgtgcattcttcctgataaaagaggcccagcacaagctgctctttttccgacagggcacggatggcctctgccagttcctttacggtttccttcttttccagttcggattctggctggccattattccgttccccggacacgagccgggatgccgcttccggttcatcattgtcggtgcccgtttcttctattgacaggacattggcaaaaaactgttcattcatcgttgtgcagacttccgtttcttccatgccaagctccaaagcgacttctttcggagaaacggcgcgcaagtatttctgctccagcttttcaatggcactttcaatttttttcgctttttctctcgtgccccttgacagccagtcttctttccgcaggccgtccaaaatcgcgccgcggatccgaaaagaagcatatgtatcaaatctcagttcgcgggacggatcaaatttgtttaatgaatccaaaagcccgaacatgccgaggctttttaaatcctctttcgatacgttgcggggaagcccggcggcaattctttggacatggaaagaaacaagcggcatatatcttttcacaagggcattcccggcttccggatcacgggatttaagccacaaatcccagtctttctgctcttcaccctgtattggctcctccgccatatcgcatccctccttgttgccattgccttttcccgaaaacaaaggggcggcccctattatatttcgacagatccctggttgaccgttctcacggtcagcacggcattttccgggttaaattcaatcgtgcggccgcttttccccccggtatcttcggccaccaattgaatgcggtactttttcagttcgtgttttacagcctcgacattgcgcggcccaatccgcattgcttcattcatggaagaaaaagaaaacatttcggctccgccggcgatttttgccaacagcctgctctggtggcagcctacgcttttcaggatgccgatcagctcaaaaatggcggtatccgcaaattttgctttattcatatgctccccgttcttcgcaatgaaggatgaaggcagcatcacatgggcaagcccggctgttttggccggcaaatcgtacaggacgacgccaacgcatgatccaagcccggtggtcctgatcaggccgggagaagtgacaatcttcatttccgcaatgcccactttgacgatgttcatttcgctatccatttaattcaacccttagcgcacggaacaggatttcataagaatccggatccggaaagaggaaaaaatgccccttcatatcggaattttccgcctgctcatcgctcagcaccgtatcaatcacgatggcataatcgctgacctgggacagttcaatcaaaccgtagctgataatggatccgaacatatcaatgctgagcgccgggacggaaggcagcatatccagcttcgtaaaattggaaagcgccgttaaataagaccccgacaaaatattgcccagctccagcatcgccgacagcccgagctccggataaggcggtttttcaaaagaaaacgacggatctccgatcatttctttaatgaatcgttcgccctgggcaaccggcacgatgaaaaaaatattgccgggtgcatcgccttgaatccgtaaaaacacgctcaccacaacgagctcagcaccgccgatcagatccatgatttcttcaaaagaagcaatatggacatccggaaccgtcattttgatttttttatgcagcaatttggaaagtgccgttgcggcatgccccgctccgatattcccgatttcttttaagacatcaaggtgaagatttgtgattttatttttaatatccatttaaaatacccctattgtaatggcgttaaagttttttctaaatcaagcagcagcaaaagcctctggtttatattcgccacaccggaaataaagtcctctttgcccgcgtttaccacttccggctcgggttccacttttttttcgtcgatatccaggacatccgtcgcctcgtccacaagcaggcccgtttcaatctctccaaaccggacgatgatcagcttgcgttcctccgtatcagcgcccgtgtcatcctccatgccaaaccgttttttcagatcaatgaccgggataatgacaccgcgcaaattcatcacgccaagtataaaaggagcggtaagcggcactcttgtaatatgctgcagcttttcaatggccaaaacctgcgtaaccggcagggcatactctttatcatttaactgaaatacgatcactttctccaacgatctcaacctctttcctgggcaatgaagtgggcggcaagcaccctgttttctatttaatcagcgcattgctgtcgatgataagggcaacctggccgtttccaagaatggtggccccggaaatggcaaatacattcgttaaataattccctaaagattttaatacgatttcctgctggccgataaaggcgtccaccacaaacgcagccagtttttcccctttccgcacaatcagtacggagacatattcatcattttgctttgcgtccggaacttcaaatatttcatttaaaaagacaagcggcaccactttgccccggaaatcgatcactttttggtgatgcgcttttaatatttcgcccttcttaataatggccgtctctacaatagaggataacgggacagcatatttttccgtcccgatttccacgagcatgacggaaatgatcgacagggtaagcggcagctgaatcgtaaagacggatccgcgcccttctgcggaatggacagaaatcgagccgcccaatgattgaatagttgatttcaccacatccagcccgacaccacggccggaaatatcagatacatggtcagcggttgaaaaaccggattcaaaaatcaggttataaatctggctgtctgttaaactgccggcttcctcctttttgacaatgcctttttcaatggctttttccagcactttttcacggttaatgccggcgccgtcgtcttcgatttcaataaacacatggttgccgctgtggtaagcttttaacgtaatggtccctgtttccggctttcctgcccgctttctttcttccggttgttcaatgccgtggtcgcacgaattccggatcagatggacaagcgggtcgccgatttcatcaatgacggtgcggtctagttctgtttcggcaccgataatgtcgagatccatttttttgtgcaattctcttgccagctggcggacaagccgcggaaaacggttaaacaccgtttcgaccggcaccatccgcatgttcaaaatgatcgtttgcaagtcgccggaaattctggacatcctttcaacggtttcattgagctccggatggttcacttcttttgcaatttgttcgaggcgcccgcggtcaatgaccagctcttcaaatagattcagcagattatccagccgctcgatgttcacacggatcgtcttcgttgtatgtttctgtttttgcggatgctttttcgccggtttttgcggctgcttttccgctatgtccggtgcagcctgttttttctcttctgctgccggtttctccggttctgccgtttccaggtgttgtccgctctccggttttgagagggtcacggtgcttgctttgacatcttcaatctctgatactttacagattttttggcggatctcttccctgtcctcttttgagatcagcgtcaccttaaattcattgtcgaactgctcttcttccagctggtcggccggcggatcagaatggataatctcgccgcatttttcaaggatatcaaataccatgaatacccgcgccgcttttaaaaggcaatcgctgcgcaatattaccgtgaactggtaacagctgtacccttgttcttctgattgaacaatcacggcctgttcgtactggtcaaattcgtcttcctctgtttccgccttttccgctgtggcggccgaagcttctttctccgccttcttctctccggccgaaccctgttctgccgcttccaggcgggcgattgtcccgctcacatccattttgccgtccccgccgtttgcaaccgattccaccatcgcttccagatggtccaccgcagtaaaaatcacatcgataatgtccggtgttacagacagcttcccgttccgaatggcatcaagcacattttccatcttatgagtcaggttggcgaggtcttcataccccattgttgccgacatccctttcaatgtgtgggcggaacggaaaatttcattgacaatttgcaagtcatccgggcttttttcaagcagcagcacattttcgtttaacgactggatatgttccctgctttcttcaataaacacttccaagtactggctcatttccatctataccacaccctaatcactaataaatttcatgattgcctccgcaattttttccagcggcaaaacttcatccaccactttcgcggcaatggcacttctcggcatgccgtaaacgatgcagctttcttccgcttcgacaatcgctcttacatgcccgcgattctttaacgcgatcaaaccttttgttccgtctgaacccatcccggtcatgatgacggcaagtgtttcatagtttttcagcatgctcaccgatccaaatgttttatccacagccggcctgtgcccgttaaccggcgcggattgctcaagccggataaagagatgtgcgccgcgcgcctccacgcccatatggaagtccccgggcgcaatataaaccgcccccggcttgagcatttcgccatcctcggcttctttcaccctgatgtttgaaatggcattcagccggctggcaagcgactttgtaaatccgcttggcatatgctggacaaccagaacaggcgcttccaaattcccgggcagggaagaaaggacggtttgcagagcgcgcgggcctccggtcgatgttccgatgcaaaccaattttttccgtgctatccgtccgctttgaacaggatcggacaaaggttgcttgtttttttccggttcgcttcctttacgtttttcccatttcacaaatctgccccctgtttttcaaaactgtcattcattgccctgttattgccatgcatgtttaatgtttcagcaaaagccccttcagtttccgcataaataccggggcgcgcgggccgggcccgtccggattgccagatacataacggttaagcaattcatcgattcttcttgcagccgctgaatgcggaaatgcactgtaaaacggcagctgccttgatacggctttttttacatgcggatcttccggcacaacgccgagaatgtttacttcttttcctaaaaatttcctgactgtaaattgaagcctgtttaacgtcaacattccgtctttttctttttccgcccggttgcaaattaaatatagggaggtgctgaattgctgcatgtaaatatatttcatcatcgaataagcatcggtaatcgcagtcggctcaggagttgtgacaataaaaatatcatcagccgaaagcaatactttaaggcttgaaggcgcagcgccggcacccatatcgaaaatgatgtaatcaaaatcatactggagcagttcgagctctgtgacaagcctgcttacagcagcttcttccatctcgacaatttgagcaaacccgttgccggcagaaatataggaaatgccggccggcccgccgcatataatttgggcaagcgggatattccggttgataaagtccgagatcgtatacgacgcatcaagcccgagcaagacatggatattgcccatgccgacatccaggtcaaataaaaggactttttttccctttcccgcaagtgccattgccaaattaaccgaaatattggacttcccgaccccgccctttccgcttgcgactgcgagcgtttttgccgggaccccgtgttgcatttttaactttgcgcgcagctgttctgcctggtctctcatttgccgttctccccaaatacgtattcggcaaaaataccgggggttgcctcgagcatatcatccgggacatcctggccgtttgtcacatacgcacagccttttccatactgctccattaaattgaccgcagcgccgtaagtggatgtctcatccagcttggtgaaaataaaccggtcaatcctgatgctttgaaaactgtcaacaacttctttcatatctttctctttcatcgttaaagacagcgtcagaaaggtgtccatttccgcttgaaaatcgataagcccagaaagttcacggacatattgccgctccctgtaattccggccggcggtatcgataaaaatgcggtcaaaatcggaaaatttatcgatcgcttttttgaaatcggacaatttatagattacttcgagcggaacattcagcaggtttgcatacgtttttaattgttcaatcgctgcaatccggtacgtatccgttgtaatgaaagcaattttttcttttctttcgagcacggcccgggcagccattttggcgagtgtcgtcgtttttccgacaccggttggcccgatcaggttcacgtactttctccggcctctcccgtaagtaaaacgggacagctttttttgaagcagtgccttcgcttgttttaaaatttcttcttccgccagattgccgtttgctttctcccattcttcatacagggcatccccgatctcaagcagcaacgattcatccagcccttgctgcgaacctgagtttaatcgtttttgaaccggcagcggatacttttggtaagcgggattggcaaatttcgacacttcacggaccacttttttcagctctgcgatttcttttttcaggctttctttttcggaacggacggaagcatccggcgcgcgcgcgggtttttcaccccgttcggttttcaggctataggcgggggccgtttgtaccgtgccattttttccggcatccggatcaacagctgcaatcacttcgatgttgcgctttttcataaatccgagaaagcctttgcgctggaccacttttgaatttaaaatgacggcctggtccccgagctcaaggcggatctgtttcattgcttcagacatattgggcgccataaactttttgattttcattctatgttcaccagccctgtgctttgtacctcaacgtttgcttccagttcattataggaaagaaccggcacctggggaaagaaccgttcaatcatttgccgcaaatacatgcggatggcaggcgaacaaaggatgaccgcggaactgccggtcagcgataccctttcaacctgctgtgaaacggattccacaattttttgcgacacggacggatccagagaaagatagttgccgtgctccgtgcgctggatgccgtccgcaatcaatttttccacttttcccgaaacggtgatgacttttaattgcccgtcttgcgcatattgcgccgtaatttgccgcgcaaggctttggcgggcgtattccgtcagcaaatcagtatctgttgttaatttaccatagtcggctaacgtttcaaagataaccggcagttttcggatggaaacattttctttcaaaagattcgccagcactttctggatatcgccgacggacaacgggttcggtgtcacctcttccacaagcaccgggtacgactctttcaaatggtcaatcaatgcttttgtttcctgccttccgagcagcatatacgcgttttgacggatcatttccgtaatatgggtcgagacaaccgtcggaggatccacgaccgtgtagcccatcatttccgcctgttctttttgttcttccgtgacccattttgccggcattccaaaagccggctcgaccgtctcaatgccctcaacggagccgtcatcttcgccgggtgccatcgccaaatagtggtcgagaagaagctcgcctttggcaagttcattcccgtttattttcaaccggtactcattcggctcaagctggatattatcgcggatccggacaaccggaatgacaacgccgagttcgatggcgagctgcctgcggatcatgacaatcctgtcaagcaaatcgcctccctggttggcatcaacaagcgggatcaggccgtagccgaattcgaattcgatcgggtcaatatcgagcaggctcatgacgctttccgggcttttcaattcttcaggctgaagttcttccgctttctccgcgctttcctgttccgtttttttcgggacttgctgaagccggaaaccaccgatgaaaagagccgctgccaccgtcatagttaaaaaatcattaatcggcgtaaacaggccaagcaaaaaaatcgtgcctcccgcgatatacagcatttttggataagacaacatctgcgccattacgtcctggccaagattgccgtctgatgccgccctcgtgaccacgatcccggttgctgtggaaatgagcagcgccggcacctggctgacaatgccgtccccgacggtcatcagcgaaaactggctcgcggcatcactgatggagaggccgagctgggtcatgccgataatgatcccgaaaataagattaatgagaacgataatgatgctggcaatcgcatcgcctttgacaaatttgctggcaccgtccatcgcgccgtaaaaatccgcttcccggctgactttttcccggcgggcgcgcgcttcctggtcggatatcatgccggcattcaagtccgcatcaatgctcatttgcttgcccggcatcgcatcgagcgtgaaccgggctgccacttcagccacccgttcagcgccttttgtaatcacaataaattggataataatcaaaatcgtaaagacgacaagcccaacgacgatgttgccgccgacaacgaacgatccgaacgtctcaatgaccccgccggcattgccggtggaaaggatcgagcgggtggttgagatattcagtccgagccggaataaggttaaaatgagcagcaacgacggaaagacggaaaactggagcggttctttcatattcattgagattaaaagcaccattaatgcaagagaaatattacatataattaaaaagctcaatgcccatgtcggaaacgggataatcagcatggtgacgattaaaatgacacctgcgatcacgggaatatctctcaaatctcttgcactcatacggtttctctcctaacttgcgtgaaaaagcttaaattttatgcttgattttgtatacgtacgccaaaatttccgctactgctttgaaaaactgttccggaatgcgtccgccaacttccacctgctcataaagtgccctcgccagcggccggttttccagcatcacaatgtcatgctcttttgcgaccgacttaattttttgagcaaggaaatccgccccttttgccacaacaataggcgcatcactctttgcttcatcataccggaggcagacggcaaaatgcgtcgggttggtaatgacgacatcggcattcggcacttcctgcatcattctctgcatggccatttcccgttgtttttgcctgatttttgatttaatcagcgggtcgccctccatgtttttaaattcttccttgatttcctgtttggacatccggatatttttttcaaagtcaaaacgctggtacaaataatcaagaacggcgagcacaaacagcgcaacggaggcgctgatgccggttatgacagcgagatgcccgactgcacccagcgtatcgcccgcgcttttaaacggcaggcctgaaatatcctggatgttggtccaaataacgtaaaaagcgacggcaccgaccactgccatttttaaaacggattttaacaattccataagcgcccggatcgaaaaaatccgttttaatccggcgacgggattgattttgtttatattcggtttcagcccttcgccggtaaagaggaggccggtttgggccacattgccgatcacgccggccaaaagggcaacggccatgactggcaaaagcatcgaagccagctgtttcatgacgccggtcatcaatttgccaacgctttgctccgtgacatcctgcagcatgtattttgaaaaggcctggcggaagagcgccatcatcgggcttccgatcgaggaggccccgaaatacaagaacagaaacaccgccagaagcatgacggccgttacgatatcctggcttttggccgtctgcccctttttgcgggcatcacgccgttttttcggcgttgccttttctgttttctcccctgcgaaaaactgcaaatcgagtgagaggtgcttcaaacggatccccccaacagtgccatacaattccgcatcgcaacaaacatccattcaaacagatgttcaactgcaatataaatcgtgcccattgccaccgccagcgcgatcaaactaacggcaattttgaccggaaagccgactacaaaaatattaagctgcggcacggtccgggcgatgatgccgagcgcaatgtccgttaaaaacaggacggcgacaacgggtgccgacatttgaaaagcgacgagaaacacacgggccaaaagtgttgccaaatattttgcaagattgaaagacccgagatggatccacgcctgatcgagcgggataaacgaatagctgtaataaatcccgtccaaaagcagatggtgcccgttcagggaaagcaataaaagcagcgcaaaactgtacaaatattccccggtaagcggcgtttgcgcccctgattgcggatcaatcacattggccatggaaaaccctgcctgaaagtcgataaacgtgccggccaattgcacggccgacaaaatgaaataggctgtaaagccaagcagcaggccgacaagtgcttccttgatcatcagcaaaaaataggcaccgtccatggtgaacggtttggcatggattgtgtacgtcacaaggacggacaaaaagaaaccaaggccgatccggaaccgggccggtacgctcctgtgggaaaacaacggcatcatgataaaaaaagttgtgaccctgatgaaaacgagtaaaaatatgctgaatgacggaatcagttcatccatgtgttaacctatatattgtgttaaattggataaaatttcttttgtgtatgtaagcatgtggctcagcatccacgggccaagcagtacgaggccgagcagcaccgcaacaattttcgggacaaatgccagcgtctgttcctggatttgcgttgcagcctggaagatgctaacaatcatgccgacgacaagcgcaatcaacaaaagcgggccgcagaccataaaggtcaccatgatgcctttttcggccagtgaaatgaccatttcctcactcaatccattcaccttctttaaaaactttcaagcagcgacttcacaacaagataccatccgtccacgagcacaaacaataagattttaaaaggcagcgagatcatcacaggcggcagcatcatcatccccatggacatcaggacgcttgccacgaccatatcgatgacaagaaaaggaatgaaaatcataaagcccatttgaaaagccgtctttaattcgctgatcgtaaatgccggaacaagcgttgtcattggaatatcctgcactgactttggctgctttttatgggcataatctaaaaacagctgcaagtctttctgccgggtctgtttcgccataaattccttaaacggcttctgggctttgtcataagcctcttccagcgtcactttatcatggaacaacggcgtgagcgcctgtttgtttacctgttgaaacgtcggggccatgataaaaaacgtcagaaacagcgcaagccctacgatcacctgattcggcggggctgtctgcgtgccgagcgaagtccggacaaaagacaggacaatgacaatccgcgtaaaagaagtcagcaggattaaaatactcggggccaatgaaagaacagtcataagcaaaaggattttgaccgaaagggaaaccgtatcgccggatgtgctgcttaatgtattcaacaactcattcatcgttctgtttctccttctccctttgttccaattctttcatcgcctgcgcccgctcctccctgatcgcgctgatttgcgatttcagcaaatgcccgaacggggttgcttctgtttttgccccggtttccctgtttttcacagcttttatgagccttgtcgcaatatcgcgcggttccagttgctgctcgagctttttattgtactggtcaacgaactgcctgacctcttcctcgtcatcaatttctttgacaagctgcacatcgtccccgacacctaaaataagaatcctgtcccccgcttttacaatttgcagcgacttgttcccgcccaaaggcgtgccgccgaaattctgtatcattttactgctttgataggcacggcttcttttgttgacaaattttaaaacaaagtatagtagacaaatcacgaaaataagtgcgaggatcatccgcacaatatccccgaaggttaccgccggatttgccgtttccgattgtttagccccactttcggattttccgtccgattgtttttggcactgtttcggatggtcgatgcattctttcacattcccgttaaaagaagccgcaagggcattgccgggtgccggaaacccgtacaacaggtaaagcagaattccaagcagcaccagccccttcgtcacttggctttgcaaatcactgtcaccttcctggcatcgtcagccgagcgttttttggatggcctcgatcacacggtcagcctggaacggtttgacgataaaatcttttgcgccggcctggatggcatcaataaccatcgcctgctggcccattgccgagcacatgatgacttttgcatccgggtcgatttttttaatctccttcagtgcgcagatcccgtccacttccggcattgtaatatccattgtcacaagatccggccggtgttccttatacttttcaattgcttgtgcgccgtctgccgcttcagcgacaacgtcatatccgttttttgtcagaatgtctttaatcatcatgcgcataaacgcagcgtcatctacaatcaatattttctttgccatttgaatcttcccccattatctcagttttttcagccggtctttctggctcacaatatctgtcacacgcacaccgaagttctcatcaatcacaaccacttccccgatggcgattaactgatggttgatgagaatatccacgggttctccggcaagcttgtccagttctacaatggagcctgcgcccatttcaagaatttcccttactgttttcgatgtcctgcccaattcaacggtcacttcaagcggaatgtcaaggagcatgtccagatttttcgtttccacgcgcggcgctgtttcttcaaaactcgtaaaaacagccggctgcacattttggtgcgtctcctgtttttcagcattttgagcaggctcagccggtttttccgcagcatggcctcgtacattttgatccggctgcttttccccctcttttttccaggcttccgcgggttgttccggatggatgagatcactgaccagtttttttgcaaacgaaagcggcaacagctgcatgatctgcgaatcgattaatgacccgatcataatccggaacgagacttttacaagcaaatcctgatccgggagcttatccgtgccttctccttccaaaatatttaaaagtgaaacggccggcggagaaatatcgattcttttattaaaaatcgtagacatcgaggtggcggcagaccccatcatctgattcatcgcttcctgtaccgcgctcaaatggatctcatccagttcgctgctcggattttcgccggttccacccagcatcaagtcggcaataatagcggcatcagattgtttgatgacgagcacattcacgccggaaaagccctccgtgtatttcacctgaatggccacgtagggatgtggaaattcatccgccagtttgtcgtgccggacaatgctgacctcaggcgttgtaatttcaactttttgtgaaagcagggtggacaatgccgtcgcagagctcccgaacgaaatatttccaatttccccaagcgcatccctttccatggaatcgagataatcttccacatggagggcatctttggcgcttgcgtcttccagatttgcagtgccgttaagaagggcatcaatttcttcttgcgacagcatatcatcgctcatacttttcttcttccccttcctctatgatatccaggatttggacagccattttagtgccttgcttgcctggctgcccgatgaatttcggaattttatccaccttgacaaccaacggctcttcaatggtttggttcagccgtatacagtcgccaatttctaaattcagaaagtcttcaatttttatcgttgccgtccccagttcggcggtgagcggcacttttgcctccttgatgccttcttcgagcaggcggatattgtccggatccggttcctttccggcgtgctgcatccaataatgcccggacaatttcggcatcatcgggtcaagcaccacttgcggcaggcataaattgatcatgccgtttgtatcgccgatggtcgtgttgagagaaataacgaccacggtttcattcggagaaatcatctgcagaaactgcggattgacttccagttcagtcagaaagggattgatttcgatgatctcactccacgcttcctttaactggtcgatggtctggtcaaaaattctcgtcatgattttcttttcaatctcagtgagtttgtcaattttattgatgctttccccgtaccctcccagcactcgatccatcatcgtgtaggcaatgttcgggttaatttccataataatattcccgtcaagcgggggaacttcataagccgtcagaagggtcattttcggtatcgaacggataaattcctcatacggaatctggtcagccgatgcaaccgaaatctgcacgtaagtccggagctgggcagataaaaaggttgtgagaatccttgagaagttttcatgaattcttgtcaggcttctgatctggtcttttgaaaaccggagcgcccgcttgaaatcatatactttgactttccgggtttcctctttttttatttcctccgcattcatttcccccgttgacagggcggatagcagcgcatcaatttcagactgcgataaaatatcttccggcaactttatccaccccctttgtatacatacaggcacaggggccggactgcctgctgcggcactgcctttttgctgcaatctgcccttgatccggcaggcggcatacttttattggataacaaaggaagtaatatatacatttacaacttcgccgtcctgcatcattttatttaaccggttttttatgtctgttttaaacttttgcttcccctgctcagattgcaaatcccgcatgttcatatttgacagctcgtcaatcatgatgtctttgatttggaaatctctttttgtcagttcttcttttgctttcttatcgtttccttcaattttgatggcaatctggacaatgtggttgtctttcagattggttgtcatcgtgtcaatgtcaacggaagagtcgacaacttcatctatatttggccctgttgcgtttgttgcttcgttcgacttataaatgacgccaatggtgatgatgccggccagtaaaatgacggaaatcatcacaagcatgatccgcaccattttattcattccggcccctcctccccggcatttcttccaagcaaagaaacagcccggaaaaaggcggtcactttttgctcgatttctttgctcgactccctgacaatataggcgtggccgtttgtcaggatgattcttgtatccggcatgctttccaccgtttcaatatgaatggcgttaatccagaatgccctgccgtttaattttgtcacttcaatcacattgtgcgggccgggcgaaaagccctggcccccttccccctatcgtttcagattgacaagttcctgcagaatttcatcggatgtcgtgataattcttgtattcgcctgaaacccgcgttctgctacgatcatattcgtcaactcttccgacaggtcgacattggacatttcaagatagccggatttgatcgtgcctgcacccttctgtcccggctggcttacacccggctggcttactgtcacctggcccgcattggaattcgcagtggtgtataaattgccgccggcttttgtcaacccggcaggattctggaaagtggcaatgctgattattccgattgtattgccatcctgatcggaaatggttccatccgttgcgaccgaaaagctttttacatttgctttaagggtgattgcttgtccatttgtgcccagcacagcaaaaccttctgaattaacgagccttctgttattatcaaagtaaaaattgccggcacgcgtataatacgtgtcatttccatcccgtaccctgaagtatccgtcccctgtaatcgcaaagtcaaggggacgccccgttgattccgggcttcctgaagtatcaacggtatcaattgaaccgatttgggacccaaggccaacctgctgggcgcttgtgccgggcgtagcgctgaccagcgtctggctgattgcatctttaaatgtcacacgcccttttttgtacccgtaagtattcacatttgcgatgttgtttccgatggtatcaagttctgtttgaaagtttttcatgccgcttacacctgaatataatgaacgtaacattgcattaacccctctccatttttgttttcagctgcgtctgtcattcggcagctgcggccttccttccggtccggccggtgattctaaaatgatggcgccgttaatattgctgaaaatttgggaaccggcttcactccggtccattgcagtaatcactgttgcattttttgcgctgacgatcagcgcggcatcatctgccaggaccagtgtctcatccagcccttttttctttgcctccgccacctttgcgctgatctgtttccaggtggaatcgtccagttcaatcccccgttcctgcatcctttcgccggcatgtttgctgatttttaatgcggctggttcagactgcccggacaatgcctgctgcaaataatccgaaaaatggccggtttggttttttccttcgccggattctcgcgttccattaagagaacgcacaggcgcggttcgctgcaatggaatggacggataggattgatccattcaatcacttcctagtttgcaattttcgtaagctgcccgcttgcggcttttttcccgttgtcaagtgtaaaaaccaggctgccgttttggatggcaacggtactgaccgaagctgtttcttcttctcctgcatcatttgtataggtcacttttttcccaattaaatagcttgcctgaatcagtgctgcttcatttgaagtgctgctgtctatccctgtcatatcggaaaaactgattttcgtcccgtcatccagggtgaaggtggccgcattgtcatcaccgaatgaaatgccggtaatcgtcccggttcccgacttaatggatgccgtcccgtcatcagctgtttcggtttttttccaggaaaccgttctcccgatatattgtgtatacgcaatttgctgcgattgctgcgaaagtttgatcaggttgtcgatatcgtctttcaaattcgtcatttgctccaatgaggagaactgcgccatttgcgatacaaattgcgtgtcgtccatcgggttggtcgggtcctggttttgaagctgggcaatcaatattttcaaaaaagcatttttatccagcgtcttgcttcccgtacgcgtgccggaagctgtattttgattgctcaacagcaggctcgggtcaatagaagtcatgtcattcacctacgcttccgcatcaatcatattgttttccaacatggccgaaaaatgtcccgcttccgggttttcccgccgcttttgctgctgttgccgttgttcgcggcccccgctgtccccgggctggccgtgggctgtttgcgccgctgtatcgcagtattcaacatccatttttgttaattggacctgctggcctgccaaagcatgtttaagctgctgcagctgggaatcaagcaaatcttttgccgcaccggtgtctgtcaggatttttgctgccagttttccatcctgctcaagcaattcaacgcgcaaagaaccgaggttttcaggttcaaggcggatcaacagccggcttgcgcctttatggctggaataggctgccttttgaatgatattggcaaattcctggacgaactgccggtacgaaaccgagttgtgtttttcgccggtgtaaaggacgaactgttccactttgccagagagtgaaaatgccggggccgtattgccgttcccgtttatttcttctgctggttgaagatgggtgctgttatgcgcaacggggcttcgtttaccggtttcccatccgtttgccatcccatctccggtactatcgtttccggattgccctgtttgctggatttcccgggaaaaattcggcacgacatgccggctgctgtctcccggttttccgttttcctgctggagatccgtatgctggcccggcacagcagcctgcacctcatcaaccggtgtttttagtagcggcttgggtccactgtcactgccaggctgcccggtatttgcctgcagatgggcggcgctcgtttgcacaacgggcccattattttgtaatggcccgccagtcccgttttcatttggcgtattgccccgggtaactgctttgccattttgggcatccgctcctgaagcacccgcctgcaccggttttgcggccggatacccggtgttttcattcacggccacggcttcctctgccatgctgaacggcgacccttcctgccgacgggacaagcggccatcctttgataaggcttccgccagtccatttttatccgtttgcagcggcgctgttccggcggtgcccgtacctggagcagccgggtcgctttcttcatttgccggcgatgccgcttccgtcatctccggaaccgccctgtttgcagaaaacagcccggtttgaagcagcgcccggttgctttcctgctcattttgcgctggcttggcactatccggtccggaagccatttcctgcgcagcggcatttggggataaaggaagagcagacgccttttttagcagggacgaatccgctttttcgtcggttaaatgcaaataagccgtttttaatatttcttcttttacgacaacgcccggctgttgcggtccgcttgaaaccgtctgccccccgtttgcatcatctgctgaaaccgcctttagaaagcggccgattttttcggacaaccgggataattgttccgttgtctgcatcattttgattcctaccgctgtattcctgggatacgtttttagaacagcacctgcctgtccgagcaatgttttcgcatcttcaaggccgagctttattaaagacgggaccggcatggaggcgagcatttgcgccatattcatgatagccgccgcggcatcgcccgtttcgattgccgtttttgtttcttgtatcatttttttgctattttcatcttcagcaccggcaaaccgcacaatccgattgaaaagggcggaaacggcctgcatatcagcctcttcatcccggcttccatcttctgcagcctgttccgctgccccggccttttccgttaaaaccgccacaatcatttgttgaagcttttggcaaacatccactgcttcctggttttccgtcatccgcccgctgtcctggccggcaaggctcaaaagctgaaaaaacccggatggctgcgtctgaagcggcgcgccagctgtttgcgtgcctggcggagaaaatggcataagttgaagagccgaattaacgttcatgtttttcacctcctttcaagtttaccggacggcttatgttcctgtacgcccgagcatttgtgtatattttgctgctttatcggcgctcattttttcaaggacgttcgccagtgtccccgaactgagctgggaaaggattcccgttgcctcctggtcgttcattttttgaataatggcagccgcgttttccggattcatattttcataggtgcttgcaatttcttttaattttttctggttggctgcctgttgttgctgggctttctttagttgttgcttcagatcggatactgtctgtttcattttcaaattgttctgctggcttttgtccagttcggattgcagcttgctgatttctttgtctttttccgtcacttgtttttgtaaagaacggatctggcttttatactgcgtttcgctgaatgtgccgctttgcttctgccctttttcgttcccgtctgcgccaaacatcccggtcacctgatgggccaggcccgatgctttgctgatgacattgacgcccgagatggtggcgataatgatcgccatcgctgtagcaaacagcagcggaatcagaatcacatagaaaaaccactgcagtttgccgccttttttttcttcttctgctgtctcgatttcttccatttttttgcgcataacatcacccggttttcaggctttagtggtaaaaagtctgggttgaaatttcatccgcctgcttttcttcctgtagcttcagtttcatcagaaaacggctgtaatctttgtctttcagtttttcatattttttgacttctatatttttctcctgcagcttctgctggtgccagttcatccggttgcgtgcattcatgacaaggttctggtaataatggattgatttttcaatatcatcaataaaccaccggtaatgccggatttcctggacggaaaggcccgttttcattttctcagcctggcgggcttccaggtcctctttctttttcaaaagcccgtacagctcacgggccacattttcaaatgcctgtaccgcatttttgtaagcactgagcgcctcgtctttttccttttctctgacatcaaggattttctcgaatttataatgataattcatgcccactcacccgtttccgcaagcccgattaaagccctgatgctgctttccatgctgcaggtttcgtcggtgctttgcttgataaaagaaacaattttcggatagcgttcgatcgcttcatcaatttcttttgatgcacccggtttataagcgccgatattgatcaggtcttccgaattcaaataagtgcttaactgttcgcggatcttttccgcggcttttttgtgcgcgggacttgcaagctggctcatcagccggctgacgctttttaaaatattgattgccgggtactgccctttatttgccaaatccctgtccaagacaaaatgcccgtctaaaatgccgcgcactgtatcggcaatcggttcattcatatcatccccgtcgacaagcacggtgtaaatgccggtaatcgtgccggattcatttgtaccggtcctttccaaaagcttcggcaaaatcgcgaaaacggaaggagtatatccttttgtagccggcggttcccccgttgccagcccgacttctcgctgggccatcgcgacccgggtaaccgagtccatcataaacatgacattaaggccccggtctctgaaatattccgcaatcgctgttgccgtataggcgcctttaatccgcatcaatgccggctggtcgcttgttgccacgacaacaatggacttttttaaaccttccgggccgaggtcgtgctcaataaattcccttacttctctgccccgctccccgatcagggcgatcacattcaggtcggcatttgtgttgcgtgcaatcatgccgagcagggtgcttttgccgacgccgcttccggcaaaaatgccgatccgctggccttttccaaccgtcagcaaactgtcgatcgcgcggacgccgagctcaatcggttccctgatcggcgggcgcttgagcgggttgggcggcgtccggtcgatcggaatcggttttaggccggcgggaagcggggaatggtcgagcggcatgcccagagggtcaatgacttttcccaacagccgcgggcctgcttttacctgcatgggtttccccgttgcttccacaaggctgccgggagagatttcctggatgttcgtataaggcattaaaatgacattctcgtcacggaatccgacaacttcggcaatgatttttttcgcattttttttgttgtccacatgaatataacagatatcgccgatggaactttccggtccgagtgattcgatcattaacccgatcactctttttacttttccgtaatgtttaaacgtcccgattgcgggtatataatttaagagaccggctgccttcattccgcatcctccccgatcagttccaaaagctttgccttaagttccgacagctggatgtcaatgcttgcgtcaatcctaccgctgccgctttcgatatagacctggtacggtttaagcgaatcatccgggtagacatagcattttgtatcgttcgggaagagggcatcaagttcttccttgttatccatcacaaaggcgtattgccccggatggatatggagatcgacttctttatacccggccgcttcttttaacacgttttttacgatggaaagcattttttcgggggatgtttcaagcgtgtcatgcaaaatttttcctgctgctttcatcgcgagttccaaaatatctttttccgatgctgccaaatgttttttaaacgcctctttggaacggttgacgatgtcaattgactcgtttaaatggttgcggatgctttcaaacccttccttgcggccatcggcataaccggcttcaaacccttggcgctgtgcttcttcggtgagctttactttttcctgctcccactgttttttttcttcggcaacttgccggcgtactgcttctgcttctttttggctgtccaaaagcaggcgctctgcctcggtttgatattttgcgaaaatatcctctttcacagcggttgcatctcccgttttttcgggcaaagcagggagccggcgcacgctgatcacgcgcattttggaaacaacacctgcattgtgctttgttttaataatattagacaatgatgtcgtcgcctccgttcctcgcgatgatgatttcaccgctgtcttccagcctgcggataatggacacaattctcgactgggcttcttcgacttcacgcagccgtaccgggcccatatactccatttcttctttcatggaatcggccatccgttgcgacatattgcggaaaataatttctttcacttcgtcgcttgagactttcagcgcaagaagcagatcttcattttcacattcgcggatgacgcgctgaatggaacggttgtccagggtgacgatatcttcgaatacaaacatccgtttcttgatctcttcggcaagttcgggatctttctgttccagcgagtcaaggatcgttttctccgtcgtacggtcgaccccgttcagcacttcgacaacagagtccaccccgcctgtctgcgtataatcctgcgtcaccgtcgcggacagcttcctttccaaaatcgcttccacttcgttgataatttcaggggatgtgccttccattaaggcaattcttctggcaatgtccccctgcatttcaggcggaagctcggaaaggatctgcccggctttttccggatccaggtaggacaaaatcaaggcgatcgtctgcgggtgttcatcctggataaaattcagaatctgggccgcatctgcttttctggcaaaatcaaaagggcgcacctgcagcgatgaagtcagccggttgatgatggatgtcgcctgttccgggccaagcgctttttcgagaaccattttggcgtaaccgatcccgccctgggtaatatagtcctgtgccaaagcaatatggtgaaattcggtcagcactctttccttcgtttcattgtcgacttttctgacgcctgagatttccagcgtcagtttttcgatttcttcttccgttaagtgtttgtagacggatgccgatacgtccgggccgagagaaatcaggagaacggctgctttttctttgccggataatgttttttctttacttgccatcttgtctccctcctattcttcggaaagccatgaccgcaatagttttgcaaactcatccggtttttcctttgccattttttcaagctgcttccgccttgctgtagcgtcgttttcctgttcctcatttacgtccggaatacggggcggtgccgttttttccggcgtttctaccaccatctcttcttcagcctccgaagcggcccgccgtctgttccggatcatgaggaagatgagcacggcaatcacgagaagcaaacctccgccaatcgcgtatacccaccacgggattgaagctttttccgccttctccggcgcattggctgcaaacggctggacggaaaccgcgattttatcggcaaccgttcgattggtcagccttgtgccgcttgacttgtcaatcgacgttctgacaatcgtagaaagcatcgatttaatatcttttaaccgggaagcgggcaaggaagagcgttttgttctgaccggcggctcgaccatgacttctatgccgagatcgcggattttgtacgggctctctgtaattttccgtttaatccggtttacttcgtagttgatcgtgtcgcttgttttggaatacgtcccgttcccgttcgacccggatacataggaagagccgacagaatccgtgctgcctgatggcgttccggctgctgcgccggtacccttgtatgtttcctggattttttttgcgctgatttcaatgcctttcatattcgtcttatcaaccggttcaacgagatcttcctcgcgtttttcctgtgtaaaatcgatatccgctgtaacggtgacaaccgcttttcctgcacccatcagcgtggaaagcatcgtttgcacctgctgctggatgtcccgttcgatttgttttttgatcgcctgctgctgtgtataagcatttccggaagaacttgaagaatttatgtcatagtactcaaaattctggttcataatgacgatattatcagtaggaagattcggaacgcttttcgaaacaaggttgtaaacggcttttatctggttttggtccaactcataaccgggttttaacgtcaggacaaccgatgcggaagcttttgcctggctgtcggctacgaagacactttggttcggcagattgatcatcacctttgctttttcgacgccgtccatctgttcaatcagattctccagttccgtctgcatcgcatcgagctttacgacgttaaattcattgtctgtcatcccgaattttgcattctggctgaaaaaggaatagtcgatgctgccggtctttggcagcccttttgcagccaatgtgactttcaaatcgtccacccggtcttcaggcacttcgatcgttttgccgccgtccgtgattttggacggaacgccttcctggtctagttcatccttgatggatcctgtttcggagacatccagcccgctgtagagcggcgcgtattttgttttcgtcataaaataagtgattccggcagcaagtaccagcataagggcaacggcggatatgccgattgttttctgcttcttgctcctgcttttccaaaaccctttcaggttttgaaaagattgttttaacttttcattcatcattatcccccgggataaaaaattcacggtgtttcataaatagaataattggacagcaaacaacgaacgttccggcatcctttccgcctgatggcaggtggaaaggatccgggcgctatgaccgggaaacggctttatgtgtaccggatcagaacgttatacttgcatctgcatcatttctttatagccttcgactgctttgtttctgacttccagtgccgcctgcatcgaaaggtttgctttttgcacggcgaccatcacctggtacaggtccacattttcgccgttcgatagttttgtgatcatattgtcggaattgttctgctgtttgttcagttcattgacagactgcttcagcaagtccgaaaatgaaacggagccgttcgcggacggagcggtgcccgccggttttggcgacagcccgctgaaacttgcggacggcatctggctgatttgttggatagccacatcattcgcctcctttcacgcgcggaattttccctgttactgcccgagttcgagcgtcttcatcagcatcgctttggaagcattcaacgctgtgacattggcttcatacgaacgggtggcgctgatcataccagtcatttccgttaagagatccacatttggttttgtcacatatccattcgcatctgcatccggatcatccggattgtattcttttttaaaatcgctgttatcttcgacaatgccggccacctggacgccggaaccggcaccctgcattccgagtttcgaacgaaatatggaggcaaaagaaccgcctcctgcagcaagcaccacttctttccggcggtatggctgccatttcccgtttacatatgtatctcttgttgtatcggcgttcgcaatattggaagagatgacatccatccgtaaacgctgtgccgataaggcttcagaagaaatgttcattccggtgaacatggacatcttactgacctcctctcacgacatttaataaggatgaaagctttcctttttccagctcaatcagagcctcgtaataaatctggttgctggcaaggttcgccatttcagtatcgatgtcaacactgttgccgttgctgttgtaagtggtgccggattccgtcacaatttccgggtttgaatccccggcggaaaaacggaagtgccgggggtctgtccggtttgctgatagggcattgaccgaatcctccagcacatttttgaaactgacatcctgcgccttataatttggtgtgtccgcattggcaatattgtttgaaatcactttctgccggagcgaagcatactgcaatgcatgctcaagcgaccgtaacgcagtggaagagagactcatcaatggacacctcattacataaacttgacatttttttcttttatacgacaaattgtttgctattttttattttaattgtttcataacgggctgtaaatgaacatatttttaaatcacaaaaaaattttttgaaagtgggactttcggattaatccattcttcccgccttgtgaaaaaggcgcaaaaaaatttttcaagtgccttgatgcgcccggggttgcaaaaatttacaattactgggaaacactattggcaggccggatttccttaaactttataaatatccagatattagtatttgttcgtttttctggtaaattaaacagcaataaaaaaaggatacgaatcgtatccttttttgacgcaaattccggaaagcttatccgtcagttggaacggactttttcaagttcaacgaggaatttgttattcaatactttgatataggtccctttcatgccaagggaacgggattcaatgacgcctgcgctctccagtttacgtagcgcgttcacgatgacagagcgggtaatgccgacgcggtccgcaattttggacgcgacaagcaggccttccttcccgtttaattcttcaaagatatgttcaatggcttccagctcgctgtaggacaaagaactgatggccatttgcacgactgctttgctgcgtgcttcttcttcaatttcttctgttttttcacggaggatttccatgccgacaaccgtcgcgctgtattctgccaggacaagatcttcttcgtcgaattcccgctcaagacgggccagaattaacgtaccgattctttccccgccgccgacgattggaacaatcgttgtcaggcctttttcaaacaggtctttgttttcaatcggaaatgccgtgtactcactttcaatcgtcaaattggatgaggtttccgtaatgttaaacaggctgttcgtgtattcttccggaaactggcggtcttcaaacatttgtttcatccgctcgttttcaattttctgattgatggccaggccgagtaatttcccgcggcggctgacgatgtaaatattggcttcaatcacatcgctcagcgtttccgccatttctttaaaattcaccggacgtccggctgctttttgcaacatcgaattaattttccttgttttatctaacaaactcatttccattcctcctagattgattcggtatttgaactgcattgaattgccgggacctgccgcaaaatgagcaaaaagccttcatcacacgtctacccttatccgatttttcaaaacggttataaaatatactggcttaaatctttgttctgtgagatcgcgccgagcttttcgtccacatactgcggggtgatggacaccttttccaaatggatgtccggtgcttcgaaagaaagatcttcgagcagtttttccatgatggtatgaagtcttctcgccccgatattatcggtattttggttcacttcaaaagcaatttcagcaattctggtaatagcttcgtcagaaaattctatttgtataccttctgtttccaataatgcaatatattgtttcaccagggcattatccggttcgacaagaattttgacaaagtcctcaacagtcagtttttcaagctccactctgatcggaaaacgcccttgcagttcggggatcagatcggacggttttgccatatggaaagcgccggcagcaataaacaaaatataatccgttttaatggagccgtattttgtgacaaccgtcgaaccttcgacaatcggcagaatatcccgctggacgccttccctcgatacgtccgcctgggatccgctcccgtttttggaggcgattttgtcgatttcatcaatgaagataatgccggtttgttccgcccggaaaatggcttcctgggtcacttcgtccatgtcgatcagtttctgtgcctcatcctgcgcaagcacttttcttgcttccctgactggcaatttccgccgtttcgtttttttcggcagcagattgccaagcgcgtcctgcacactcatgcccatttgttccatgccggaaccctggaacaaatcaaacatggacggggcctgctcttccacttccacggtaaccggctcaccttccagttcaccgtttaagagtttttcccgtatacgctgtttctgctcccttttggagtactcctcctcctcttcatccggtgccgtgtcctgctgcccgccgccgccaaaaatcatttcaaacgggtttttgaaattcccctgcttcttccgcgacgggacaagcaaatcgacgaggcgctcatttgcatttttctccgcctgatcgcgcacgccgttcattttttcttcttttacaagccggacagccgtctcgacaaggtcgcgtaccatcgactccacatcccggccgacatatccgacttccgtaaacttcgtggcttccactttgacgaacggggcaccgacaagccgcgccattcttcttgcgatttccgtctttccgacaccggtcggcccgatcatcaaaatgtttttaggaataatttcttcccgcattttttcagacaacagacttcttctgtaacggttcctgagcgccacggcaactgcccgcttcgcttctttctggccgacaatatactggtccaggcgctcaacaatctgccttggtgtcaaactgtttgtttttctaaacgtgttggccaatccgctcactcctttatggaaatataccggtatcggctgcccattccgcttataactcttccacgataatgtttgaatttgtaaatacacaaatttcagatgcgatttcaagggaagcccgcgcaatttcttttgcggtaaagttttctgccgcatgccgtttcagtgcgcggccggcagcgagcgcgtaattgccgcccgagccgatggcgaggatgccgtcatccggttcaatgacttcccccgttcccgagacaagcagtaaattgttttcatccatgacaatcagcatcgcttcgagctttcggagcactttatcgcttctccacattttggccagttccactgctgcacgcgtcaggttgccattatattcctgcagttttccttcaaacatctcggaaagcgtaaaagcatccgcaactgagcccgcaaaaccggccagcacttttccgttaaacagccggcggacttttttggccgtgtttttcatcacgacggcgtttccgagcgtcacctgcccgtctcctgccattgcgcttttcccgttatggcggatggcaaatattgtggttgcgtgaaaatcacccatatcagcacctcctatgtaatcaaagcgaaccgccttgcattgctatgctctcgggtggtaagccatataggttttccgcaaatgctccttggttacatgtgtgtagacttgcgtggaagacaagctttcatgcccaagaaggtcttgtactgtgcgcaaatcagccccgtggttcagcaaatgggttgcaaatgtgtgccgcaacatatggggatgaatttttccggtcagtgccgcttttttgatcatttcatttaaaatatagcggacacctttatcggtcaatgcgccgccgcgtgcatttacaaataaataggaatggtcttctttgccgcgcatcaacgttttccgtgcatgcgccatataatccgaaacggcttcccctgcaaaatggccgaacagcacgatccgttctttttttcctttcccttttacatggatcgtctcgaattcaaaatcaatatcctgcaaccggatattgacgcactcgctcacgcggatgccggtcgcatacaggatttcgagcaaagcgcggttgcgccgggacaatgcatcatccccttcacatgccgcaaatagttgctccatttcttcctcataaaaaaatttgggcagacgcttatgttgtttcggctgtgataaaagtgcgaagggattttccttgacaatctgctcccgcatcaggaatttgaaaaaactgcgaatgctggatattttccgtgctaccgtggcgcggctgtacccatgttcatgcaacgttgtcaaatacagcctccccgccggataccccacctcgtctagcgaggcgatcccctgtgcggttaaaaacacaaaaaaatcctccagatccagacggtaaaatttgattgtatatgcggaatagtttttttccacttgcatgtattccataaaagaaagcaaatagccggacagttcgccgttcatctgtttaacacctcacatgtgcggggaaacgggcctgctttactccacccttcacattgatggatcacaggggctttccgggttattgccattttttccggcccggcaaggcggcccggacaaacccgccagccggcatttttgcgccgggccgggtgtccgtcatccccggcttgtgccaaccgaatgccgtctcccgccggcacatatgctttcaagccgggagacggcattcggaaatccggttaaatcataacacatttccggatcggattgcaacgaatgttacatatttttcataaatttttgaattgtcctcttgactggcgcttcctacccgtgaaaagccgggaatgccgtttactgaaaagcttttggacggtgccgccaacgattcgggaaatctgtcgttttttgtcgcaactgccctttaagcattttacaccagctgctgcaagaagtaaaagaataagttgtattttctcgtaaaaatgtaaatattcattttcatcagcccgaaatttgccgcccgctccgcgcaaggctgtaaagttccggcatggcccaatcattattccaccgactgctctttataatcacaatgcacgcactggatttgcgtcccttttttcagttttttctcaacaagcatgtcgccgcacttcgggcacttcctgccaaccggcttatcccatgagacaaaatcgcattccggataacggtcgcacccgtagaaaatgcggtttttctttgttttccgctcaatgatttcgcctttgccgcatttcgggcaagtgacaccgatttttttaacgattggtttcgtattgcggcagtcaggaaaattgctgcaagccataaacttgccgtaacgccccattttatacaccatcgggcttccgcacagctcgcacatttcccccgtttcttcatctttgatctcgattttctccatttcgttttccgcttttttcaggcgggcttcgaaattttgataaaacgcatcaatgacttggacccatggcacttttccttcttcaatttcatccaggtctttttccatatcagcggtgaattcgacatctatgatttcggggaaaaattcccggatcagttcgagcacgatttcgccgagctctgtcgggacaaaccgcttattttcaagtgccacatagccgcgcttttggattgtatccaatgtcggcgcataggtggacggcctcccgattccaagttcttccagtgttttgacaagccgggcttcggtatagcgtggcggcggctgggtgaaatgctgtttcggttcgatcgactcggagtggacaacatccccttcttcgagatgcggcaaataacgttcgccttcttcctgctggtcgtcggaaccttccacatacactttcataaagcccggaaactggatttttgaaccggaagcccggaacaagactgtgccgtttgccagcgtggcactcatcgtatccagtatcgcaggggccatctggctggccataaagcgttcccaaatcaatttgtacagcttatactggtctctgcttaaaaaggacttgagcgaacccgggtcccggaaaatgcttgttggccggatcccttcgtgcgcatcctgggcatttgcctgctttttctcttttctttcttcctggcgcaaatagttttccccgaatttttcctgaatatattgattggcttctgtttttgcgacatccgaaatccgagtcgagtctgttctcatatacgtgatcagcccgacagtgccttcttttccaaggtcgatgccttcatacagctgctgggccaccatcattgtttttttcgccctgaagttcagtttccgggcggcttcctgttgcagggaagaagtcgtaaacggcggtgccggattccgtttcttctctttgtgcgtgacggaagaaacctggaacttgtcgcttttcagcaggccggtaatttttttcacatccgcttctgacttcagctgcattttttttccgtccacaccgtaaaaagatgcctggaacgtgtctttcccttttttaaaggatccggcaattgtccagtactcttccggcacaaacgatttgatttcattttcccggtcaatgatgaggcggacggcaacggactgtaccctgcccgcactcaaaccttttttcactttcttccataaaagcgggctgatgttataaccgacgaggcggtccaaaatccgccttgcctgctgggcgtcgacaaggtccatattgatcgggcgcggatgtttaaatgattctttgatcgcgtcctttgtaatttcattaaatacgacgcggcagtccgaatgcacatccagattcagactgttggcgagatgccaggcaatcgcttccccttcgcggtcagggtcggcggcaagatagacttttttagcttttttggccgcgtttttcaaatcttttaagactggccccttgcccctgattgtaatgtacttcggtgtaaaatggtcgtccacatccacccccatttggcttttcggcaagtcgcgcacatgccccatggaagctttcactctatatttttttcccaaatatttttcaatcgttttcgcttttgcaggtgattctacaatcactaagtagtctgacattcaaaaatcctccctggagagcttataccctctctttgcagcaactttgctttcatttttcaaacaaaatcatctgtaattatgggcatggatacccgcatttgtcaattgtaacagcacggatgtatgtgtcaagtttttctcgacaagggtatgtgtcaagtttttctcgacaaggtttaaatatcgggtattccaagacactctttttgtacactttcggctaccgtgcttcacttgctcggtgtaattttcggaaaagatgtgatatttccgtataaagatggacaacggggatgttgaggcgcgcgaaattcactcgctttccgcgggcggccggcgagcctcctcgctcgtacctcgctgcggggtctctcctggctcgcttttcccgcaggagtctcgtaaatttcgcgcgcctcaacgatcagtcccgactgagccaggcttaaaatgaaagctctaatattttgcttaaatgtcccattgccgatgaactgcttgaatgcagggcaactgatccgtgctttacgcccactgacgggcgtacaggctgcttgagtagttgagacatcctgatggattgtttcaagttccgttgctttctctcgcttcttgaacggtgtttcagataggcttctctcaatgtcccattggtaaaattttacacatacagcacggatgatgaaaaatcaacatggcaaacgatttcattttgaaaattttatctattctttctctattttatatacattttatccaaaaatcatgcgttttttcacaaaatcggaaaatcgctccccatttatgaattttccctgacaattttaccttgccgaaagcagttcttccaaaatgtccccgctgcacgtcaccagttttgcgccctgctggatgagatggttcgttccttccgacaggctgtccagaacgtttcccggcacgctgaaaacttcccgcccttcctggagggcgtaatctgccgtgatcaaagagccgctccgtttttccgcctgaagcacgagcacaccttccgaaatgccgctgatgatccggttgcgttccggaaaacgccatttttcagggcgcgtaaacggcggatattccgacaggagtaaatggccctgttttattttctccgccatccctgtattttcccgcggataaatatgaaaaaatccgcttccgagcaccgcaatcgtctttcccccaaatttcatggcagcacggtgggcaatcgcatccgcccctctcgccagcccgctgacaatggtaaactgtttttcgatcaggggcggcagcaaatgatcggcggctttttccgcataggaaccggcctttcttgatccgacaacggccagcgcacgttttttcagcaatgatatatttccgattgaatagagtatggcaggaggctggtacgtttctttcagaagcggcggatattccggttcaaaacgggctgtcatccggatctgtttttcccggtagagggttaaataggggttgatgtcaagatgaaggaggtcttcataaaatcgttcaaacgtttccttttgcatctgaagcatggcgcgcagtgtttcagggggaatccggcagattttttcaagcagcggatcaaattcgaggattttcattttttgcccgcgggaaatccccctgcaatggtccaaatgaatgtatttgatttttaacggttccattgttttcctcgctttcagaccgtatttcattgaaaaaaacaaactatttaggacccggctgcacgcttaaaatggcagccggatccgggcagtttcaccaagctgccccggaaaatgcgggttccgggacggacggtgccgcaacttaaaggtttttacatttctcgtaaaggcctttttccttcaggacacggatcagcgtttccccaatgaccgccggcgtttcggccacctggatgccgcattcgttcatcgtgcggattttttcggctgcagttcctttgccgcctgaaatgatagcgccggcgtggcccatccgttttccaggaggcgctgtgacaccgccgataaatccgacaaccggtttcttcatgtttgcctgaacccatttggcagcttcttcttccgccgtcccgccgatttcaccgatcataatgaccgcttctgtttccggatcattgttaaattcttttaatacatcaataaagttggtgccgttcacagggtcaccgccaatgccgatcgctcctgtctggccgatgccggcgcgcgtcagctgatggacggcttcataagtcagcgtgccggaacgggaaacgaccccgacatggccttttttatggatataacccggcataatgccgattttgcattcatctggcgtgatgatgcccgggcaattcggcccgatcaggcgcgtttttttcccttccatataacgtttcactttgaccatatccaacaccgggatatgctcagtaatgcagataacaagatcgagttctgcatcgaccgcttccataatcgcatctgccgcaaacggagctggcacgaagataaccgaaacggttgcgcccgttgctttaacggcttcttccaccgtattaaagaccggcacgccttctacttcagtcccgcctttgccagggcttgtgccgccgacaattttcgttccgtattccaagcattgttttgtatggaaaagcgctgttttcccggtaatcccctggacaatgactttcgtgtctttatttacataaatgctcacttttttcccctgccttcttcattcaagaatatttgttcgcatttggcccgaatgaacagctgctgttagctgaccagttcgacaattttttgtgcgccgtctgccatcgattcagctgccacaattttcaacccggattcgtttaaaattttcttcccgagttccacattggtcccttcaagacggacaacgagcggaatgtcgagcccgacctgttttgtggctgcaaccacgccggaagcaatgacatcgcatttcataatgccgccgaaaatgttgacaaaaatgcctttgactttttcgtccgataaaataattttaaacgcttccgttactttttcttccgttgcgccgcccccgacatcaaggaagttggccggatcgccgccgtaatatttaataatgtccattgtcgccatcgcaaggccggcgccgtttaccatgcagccgatattgccgtcaagggcgacatagctcaaatcgtatttcgacgcttcaatttctttcgggtcttcttcttcgagatcgcggtatgccagaatatcctgctggcggaacaagccgttcgaatcaaaattcaatttggcatcgagcgccatcacttttccgtcgccggttacaacaagcggattgatttccgcgatcgagcagtctttttccacaaatacttgataaaggcctgtcataaatttaacagcctgatttacaagtttagcaggaatattgatgttgaatgcaatgcggcgcgcctggaacggcaacaggccgactgccgggtcaatggtttctttgaaaatcttttccggtgttttggccgccacttcttcaatttccgtgccgccttcttcagaagccatcagcacaacccggcttgtcgcacggtccaaaacaaggccgacatagtattctttttgaatgtcacacccttcttcaatcaagaggcgcttcacttctttgccttcagggcctgtctgatgcgtcacaagcgttttgccaagcagttcctgcgcgtatgtacgaacctcatccaaattttttgccactttgacgccgcctgcttttccgcggccgccggcatgaatttgcgcttttaccacacatacatctgttccgagcgatttcgccgcttccaccgcttcatccacggtgaaggccactttcccgttcggcacagcgaccccgtattttctcaggatctctttgccctgatactcgtgaatattcatgttccatcctcctatcaaactgttcaaaaaattaactgcgctttcattttaataaacatcggaaaagatgtctaccataatgaactaaaatggctattattattcaaaaatattttttgcagtataaaatggacggaatttcaccgttcgtttgcctgctgtgaatcgcaatctttattcaaatgggcgcctaggcctgatgtaaaactttcgttcatttgatatccttgttttttagcgactggtcgaggcggtaaatcatggcaaacacctcggccacagccgcatacagttcttccgggatcgcttcgttgatatcgagccggccgagcagcgcggcaagatccgggtcctgctggatcgggacattcgctttttttgcctcttcgataatccgcctggccgtgtcccctttgccttttgccttcacgacaggggcggaatgcgcatccgggctgtactggagcgcgaccgcttcttttatgtctttttgtggatccttcatatcctaaggtcaacccctttcccggaaacgtccggccggctgagcgcggcacgcacagcacccggctggaattccccgaaccggacatcagacaatgtgtaaccggttttggaaaggccttcctttaaggccggcaaaaaaggctttacggcttcctggaggccctttttcaaactggaaatgcggatggaaacgatccggttttgcacattcatctcgaccaatgtttctttcataaactgaagatttaagtaaaaaatgattttacaatagttactgtctatttttccgtcttttttccgcctgcctgaccattgcacaacggcattcgtttgaaagcgcgcgaaagaaagcggaatttccatccaaatgtgctgcaccgccccgccgggaagcgaaagcagttgctggccgttcagtttctgcacgatttcgtctgctgcatcccgggctgcttttgttcccccgcctttttgcagcaactcaacaagcaacgcttttaaaggcagcccgcccttgtccgcggttttatccccatgcaaaagccccgcctcataaaaaagccccattttttgaatcttctctttgatttgcaggcgcagcgcctctcctgtcacctgcccgttgcccgccccaagttccctgataagcgcaagcaattgcctggtttccggcgtctgttccccctgctgaagcgcctgctgcagccggtttaaaagctgatctaccggtgtgttttgcacgaaggtacggagagaagtgaacacgccctccgtcacaggaaagccttcttgcagcatgagggcagccgtttccagcccgtttgcaagatccggcacatgcttcagccatgcgccgattgcggcaatgtcattttttgtaaacggaatcccccgttcagccaagtacgagacaagggactggaacgttttccccggcggcagctgcatttgcgggagcaaagctttgccggcattgtcgtttgcatcggcttccgagagcattttcagccggacttcaccatcgaccaaaaccgtttgaaaccagtagttttttccggcttcaagcggcacttcgagtttcgcggcaaacgcacgcccgcctgcccggataagtgcggtgtcatttggaaacagtttttggatggcgccggaaaaaatctgccccgtttgaaaagaaaacgtgcggatatttgagccggctttaataaatggttgtttgccaaaagaaatttgcatgcttacccccccgccctgtttcttccttcttgcttatttatcggcggattgccggcctgtctttaatcggcgcaaacgattttctatggatcgggcatgggccaagcttcatgatcgcttccagatgttttttcgtcccatagcccttatgtatggcgaaaccgtacccgggatatttttcatccatttcccgcatataccggtctctcgttacttttgcaatcacggaagccgcggcaattgaaatacttttcgcatccccttttacaatcgaagtttgcgggtacggggccggaatttccatcgcatcgatcagcaaatggtccggagaagcgggcaaatggcccaaagccgcaagcatcgcctttttggccgcctcgtaaacattcattcggtcaatttcttctgcactggcaaagccgacgccgacaagggcttcctcctgaatgtgcgcaaaaaaggcctcccgctgtttttcggaaagctgtttggaatcgttcagtccgggcaggcaaaaatcttccggaagaatgacgcaagcggctacaaccggaccggcaagcggccccctgcctgcctcgtcaattccggcgatcaggcggtagccgtggctgcgcagggcgtcttcaaatcgggccatctcccggaatttttcaagctgttcacgctctttttctaattttctcatccatttttccagcgctttttgtgcgcctttccgttcatcccggcgcaacttctggacgaacggatcggacggatttgtcatttctgaaagccgcgcttcaatatcactgattttcaatgtttcccctcctatgaaaaataagcgccccttttacggaggcgcttatcccaaatcaaatgtcagaggccccagtttcatgccgcggatatcacggataatcacctcagccgttttgtcgtaatcgatttcccctcccgcccgcaaacagccgcgcaagcgcccaatatggtcaaaaaggggtacgatgtccgggatatccccgagcttataccgggcttttaatgcgtcgggataatgtttttcaagaaaacgcaggccaaatacggaaacgtcctgcaggttgaggatcgtgtctttaattgcgccggttaaggcgagcttatagccggtttccttgtcttcgaatttcggccagaggattccgggcgtatcgaggagttccatcgttttcccgacttttatccatgcctgcgcttttgtcacgcccggcgtattgccggttttggcgatatttttcccggcaagccggttaatgagcgtcgatttgccgacgttcggtatcccgacaatcatcgcccggatcgcacgcggacggatgccttttgcccgcagtctctcccattttggctgcaaaatctgttcagccagtttcaccattttgtcgagcccttttccgctttgcgcgtcaatggcaaggacatgcgtattgccaccggataatatttcaagccagcgggctgtagcagccggatccgccatatccgccttgttcaacaatttgatccgcggcttttgctgaatcagttcatccagcatcggattggcggaggaaaccgggatccttgcatccagcagttcaaaaacgatatcgaccagttttaatttttcggtcacttctctccttgccttcgccatatggcccggaaaccattgtattgccatcatgcgtcaactccatcacggttacttttttccgtaaaatgtgcagctgccgggcgcttatttattgatcatatgggcatctttcaccggccagtatacaaagtttgtctccccgaccaccttgctaagcggaatggtcccgatctggcggctgtctttgctgtaccggcggttatcgcccatcacaaaaatctgcccttttggcaccgtgtcgcgcccgatataatcttttaaggtaaaatcttccgtaagcggtccgtcggcaacggcttttttatatttatcgagataaggctctttatacgctttcccgttaatatacaggacgtcatttttatactcgatccggtcgcccggcagcccgatgacccttttgatataatctttgccttccggggcgtggaaaacgacgatgtcgaaccgtttcggggtcccgattttatttacaatcatccggtcgccgtttttcaaagtcggcatcatggaagaaccgtcgaccacgatcggggcgaagaaaaaatagcgcaaaatgccggccagtgccacagcgatcagcagcgctttcacccattcgaacagttcattttttggttttttctgtttttccatttatttacaccgcctcattccatgtatccattaagtgtatattccctgatattttgcattataacaggattggttgccgattgaaaacctcagacggcacccgggttatttatgtataagtatgaagaaaaggggccatgatagccccttttcgaacagccgttgcagcaaattagcggatttctttaatacgggcggctttaccgcgcagattacgcaggtagtaaagtttcgcacggcgaactttaccgcgacgcacgacttcaagcttcgcaattttcggtgtatggagcggaaatgtacgctcaacgccgacgccgtaagaaactttccggactgtaaacgtttcgctgatcccgccgccgcggcgtttaatgaccacaccttcaaaaacctggatacgttcgcgtgaaccttcgacaacttttacatggacgcggaccgtatcccccgggcggaaagcaggcagatcagtgcgaagttgatcttttgtaatttcgtcaataatattgtgcatcgtattcaactccttccaacaaatgctcttgcaaatcttccatcttatttgcagcggaacatcgttttacggtggcctgccttgttttcaagcaaaccacaaatgcaatcttagcataaacgcatgccgattgcaacagctatccgtgcatttcttcccattctttcagccacgctttttgcttttcggagagcgtcacgccgtgcaaaaggtccggcctcctcgtataggtgcggtacagcgactctttttcgcgccattcttcaatcagccggtgatttccggataataacacatccggcaccttcatcccgcggaaatccgccggacgcgtataatgtggatgttccagcagcccggttgaaaaagaatcggtaacaggcgaagtttcattgcccaaaacaccgggaagcaggcggacgatgctgtcgatcatgaccattgcgcccagctcgccgcccgttaacacatagtccccgattgaaatttcatcgcttacaagtgtacggatccgttcatcatacccttcgtagtggccgcaaataaagatcagatgttcttctttcgcaaacgcttccgctttttgctgcgtatacgtttctccctgggggcagagcaaaatgatgcgcggcttttttttgctcccctcaagcaggtcttctactgcatcgaacaccggctggggctttaacaccatgcccgccccgccgccgtacgggtagtcatcgacggttttatgcttgttgtcgctgtatttgcggaaattgaccagatggtaatggacgatccctttttcttctgctttttttaaaatagaagatccgagaacgccttcaaacatttccgggaacaaagtcaatatatccattttcatggcaaaagcccttccatcggttcaattacaattcttttttcttttttgtcgacttttttgacgacgtcttcaatatacgggattagcgcctctttctgctgcgctgttttcaccacccagacgtcatttgccccgggcgttaaaatctcttttaccgtcccgactttctcgcctgcggttgtcacgacttcgcagccgatgatttcatgaaaataaaactcattttcgccaagctcatccagctgttcttcggaaactttcagcatgccgcctttccatttctctgcttccccaatcgaatcaaagccctcaaacttcagcaaatcaaactgcttatgcacccggtgagattcaatcgtaagcgcaaccggttcattgcagccgggaagaaacaagtaaagcgtattgcccggtttataccgttccgctttgaaatccgttttggaaatgacccgcacttctccgcggatgccgtgtgtattgacgattttgccgacattaaaccattgtgtcatattctcacctctcgcgaatttcatggatgatgccgtcttttataataatcgatttctcttttgtcaccgcactccagtcgtcgccttcccggacgtcaacaatagcgtgcatttctttttcttttaattccgtcccgatcggaagcaaaagcagttgttcaatttgaaactccaccagtttgattttctcctgccggctttcaatttctttttcaaaatgcatttttaaattggttcccgaaaactttttttgtttttccagttttttcgtttcaaaccggagctgctcacattctttttgaagttgttgtttcttttgtcggtatgtatccaaaagcattcctttgctcttttcggtcaggatttgcttgaccatcactttttgaaggattttcaagatgccctgccctccttttcgccatttattagcaacccaaataaaagcagccggaaaaagcggatgtcggttaagatgaggggaaagcccgaaagatgtatgtaaaaagggaggtgtgcgcctccctttctctggtgttctatccatcgttgtccgttattcggcaatttcaagacggatttttttatgcccgtgcacgccggccgcagcataaacgaccgtacggatggcctttgcggtacgcccttttttgccaataaccatgccggcatcatccggatggacaatcaggcggtagagcgttccggattcttgttcatcccgctctactcgcacctcatccggatggccgacaatcggcttgacgatcgaaaggattaaatcatccatctgttggtccatgattatttgccgtgtttttcgttatggtatttttccataatgccttgttttgaaaacaagttgcgtaccgtgtcagacggttgggcgccgtttttcagccattggagcgcggcttcctcgttgattttgacttctgcaggatctacaacaggattgtaagttcctactgtttcaataaaacgtccatcacgcggtgaacgggaatctgccacaacaatgcggtaaaacggggatttttttgtgcccatgcgtttcaagcggatttttactgccattttaatcatacacctccaaaaaagtttctcacaagactgtatcatatcagaaaatcatgatggtgtaaagtcttttctcttaacacccttgcttttttacataaaagggaatttaaagcctttttttcggcctttttgattcatgccttgcagttgtttcatcattttcttcatttcttcaaattgtttcaaaagccggttgacttcctgcaccgggcggccggaacctttcgcaatccgttttttccggcttgcattgataatgtccgggcggattttttcctgctttgtcatcgactggataatcgcttcgacatgcgcaatttgcttctcatcaatttgcagattatccatccctttcatccggttggcccccgggatcattttcaaaatgtcaccgagcggccccattttccggacctggccgagctgctcaaggaaatcttcaaacgtaaacgactgatcccgcattttcttttcgagcgcgcgcgctttttcttcatcaacggtttcctgcgctttctcaatcagcgacaggatatcgcccatgccgagaatgcgggaagccatcctttccgggtgaaacggttcgagtgcatccattttctcgcccatcccggcaaatttaatcggcttttcggttacggcccggatggataaagccgccccgccgcgcgtgtcgccgtcaagcttcgtcaggatgacgccggtgatgccgagctggtcattaaaactttgcgcgacatttacggcatcctggcctgtcatcgcatcgacgacaagaaaaatttcatccggatgcgcaagttccttgatttccttcaattcattcatcagctcgctgtcaatatggaggcggccggccgtatcgatgatgacggtatcgtgatgttcttcttttgctttttcaatcgcttgcctggcaatttccaccgggctgattttgtcgccaagcgaaaataccggcatgccgagttgttttccgagcgtttccagctgcttgattgcagcggggcggtaaatatcggccgcaacgagcagcggggtccggttgtatttttttcgcagcaggttggccagtttccccgatgtcgtcgttttcccggcaccctgcaggccgaccatcatgatgacggtcggcgggcgctttgcaacggcaatcttgctctgggatccgcccataagattggtcagctcttcctggacaattttaatgacctgctgcccgggtgtcaggcttttcagcacctcctggccgaccgcgcgttcgctcactttttttacaaaatcttttaccactttgaagttgacgtcagcttccagaagggcaaggcggacttcccgcatcatttctttgacgtcgctttccgtgaccttgccttttccgcggattttctgcatcgtgccctgcaggcgttctgcgagtccttcaaatgccatttttccgccccctattccaatttttcaagcgcatcgacaagccgcgccagttccggattggcattatgcgccaaaagattgcgcatcgaccggaagattcgtgtgcgcgcttgaaacttttccaataaaccaagctttttttcatagtcttcgagcatttgttcggttcgtttgatattatcgtaaaccgcctggcggctcacaccatattgttcggcgatttcaccaagcgacaagtcgtcgagataatagagggacatatagctgcgctgctttggagtcaacaacgattggtaaaaatcgtacaaatcattcattcgcgttgttttctccagcatggcttcttccccctgttaagtgaaaatgctttacataaactcagaatacaaagattcttgttttttgtcaatgaaaacaagtccgtttacccgcaatcgccccacgctttgaagggctccctgccatacgtaataccgcgggcttgcgcgctttattatgattcgcagtgcggcccgcacgcagtcaggcttgttcttccggcacttcatcgatcagatcggaaaacaacccgtacacgtatttttctgcatcgaacggctggaggtcatccattttctcgccgaggccgacgaatttgacgggaatatggagttcgttccggatcgcgagcacaatcccgccttttgccgtgccatccaattttgtcagcacgatcccggttacgtccgtagcttctttaaacgtctttgcctgcaccatcgcattttgcccggtggtggcatccagaacgagcaagacttcatgcggcgcccccgggatttcccgttcgatgacgcgttttactttttccagttccttcatcaaattgactttgttttgcagacggcccgccgtatcacaaagcaggacatccgcatttcttgctttcgctgcttggacggcgtcaaacataacagcggccggatcggatccttccgaatgtttgatcacttccacgccgaccctttctccccagacttcaagctgttcaatggcgccggcgcggaatgtatcgccggctgccatcatcactttttttccctgctgtttcagcatatgggcgagcttgccgatcgttgtcgttttaccgacgccgtttacgccgacaaacaaaataacagtcagggcgccgtcctggatgttaagccggttcggggcttcttctccgcctgaataaatgtcaaccagtttttcggaaatcacggactggacttcagaaggggctttgatgtttttccgtttcacttccattttcaactcatcgatcagttccatcaccgtctggaagccgacatccgcctgaattaaaatttcttccagttcttcgaaaaagtcttcgtcgattttccggtaacgcgcgacaagattgttgactttgctcgagaaattatcgcgcgtttttgcaaggccggttttaaatttatcggttaccgtatcggcctgccgggtgaatttgtcttttaatgatttaaaaaaactcatttgtccacttcctttggctctcctgaatttgcgtgtcagtttgtgcgggataaaagctgcccgggcggtcctggaaatgaacgccgccctgatttttatcccgccggcccgctctggcacgggcgctactttttaaacccggcgctgattcgccctgtttaagacgtttgaaaagcgagatcggttgactcttccagtttgaccgacacaagtttcgataccccggattcctgcatcgtcaccccgtaaaggacgtccgcttcttccattgttcctttccggtgggtgatgacaataaactgggtttccgcactgaattgtttcaaatatttgctgaaccggtatacattggcttcatccagcgcggcttccacttcatcgagaatgcaaaacggcacagggcgcacacgcaaaatcgcaaacaaaagcgcgatcgcggtcagcgctctttcgccgcctgaaagcagcccgagattttgcagttttttccccggcggctgcgcgaaaatttccacgcctgtcgtaagcaaatctttcgggtccgtcagcctcaagtccgctctcccgccgccgaaaagctctcggaaaaccggttcgaattcgttccggatggcattaaacgtctcatcgaaacggcggaccatttcgccgtccatttccgtaattacctggtcaagggtgtcttttgcttcaagcaggtcggtctcctgttcttttaagaaccggtagcgttccgatacgcgctcatattcttcgatcgcgccgagattgacggcgccaagctcatcaatcgacagtttgatcaacttcacttttttgcgcgcttcctccagggaaacattgagcgggcgggcttctttcgcggcttcaaaggtgagcgtgtattcttcgcggagcctttgaagccggttctcaagttccacatccagccggtttgctttgacttcttcatcctgaatggcctgctggagccctttttgctgccgtttccattctttcaggccgcgttccaggtcttccatctctgctgtcagccgggcccgttcttccctgcgcacggcgataaaggcgagcgtatcatttttgtcacgcgctttttgttcagccgcttccgccagttcgctttccgacatgtggtgcttctccgattcgtccgtaagaaagtggtactgctcatcataacgcgctttacgtgccgcccactccttgatttcgcggtccagccgcgcaagttcttctcggtcgcgcgccgcctgctccatctttacggcaagcgttgattttaaatcgctgagttcgccctggagccggctttttgccgtcgaatcatcgtttttctttacggtcagggcttcaatttccgcttccaattcctgcgctttttcgccagtacgcgccagcatgttttccagttcgccgacccgtttgcgggcttcatcctgctgtttttccgcctcttgtttttccatatcgtagacgagcaggtgctcatccagatttttttcttcaaccgcaagccgttccagttccgctttcgcctgctgttccccaagcctcagcgcttcgccgtttttcctcgcttcatccagctcctgttgcacgcgggaaacttcggcttttaatgctttgacttccgtttcaagcgccatcgttgttttttccatcccggcaagcttttcttttagtgcttccagttcgctttttctcgaaaggagcgacacgctgttttgtttcgaagccccgcctgtcatcgagccgcccggattgacgacatccccgtcaagcgtcacgatgcggtagcggtacccgagcattttggcgattttgtttgcactttttaaatcacggacaacaaggacatggccgagcagattggacacaatggattggtagcggctttcaaagcggacaagctccgcgcacacgccgacgtatgcctcttcattgcggagcggtttgaggcttgcttccggaatggcccggggcttgataatatcgagcggcaaaaaagtcgcccgcccggccttccgctcttttaaaaatgcaatggcacagcgtgcatgccgttccgtttttgtcacaatatgctgcatcgaagcacccagtgcagtttcaaccgctttttcgtaaggcgcgggcacccggaccagctcggccacagcgccttcaatgccttccagctttttgccacgggctttcaaaatttcgcgcacgccctggtaaaagccggtataatcctcttccatctcttcaagcgtttctttgcgtgatttcgctttttgcaaatattggtatgcctgatacagattggactcctgtttttgataccggctgttgacggactccagctgcctttgtttttccatataggcaccggcagccgcttccagctcctgtttgatttctgcaaggcggccggccgccatttttttcttttcccgcaccttttcccgttcttcgacatatttccggttgtcggcttcaagccggctgaggcggtttaacgacgtttgcatctgctgcacgagcatgcgcttttcattttttccgcttgcctgctcgttcagcagttcaatatagtcgctttttaaagactcaattttttcctccagattcgtgctgaggcggaaaaggcccgcttccttctctttcacgctttctttcagggccgataaggcttgttcattttccgccgccgtttgcaaaatcttttccttttgggcttccagttcttttaaggtgttctccgcttcttttatatttttttcaagctgggctttgttctcgctgacattttttttgcgttctttcagcacttctttttgcccttcgagtttttccagctcttctgtcgctgcaagcagcacattctgcaaatcttgaatcgattcatcgagcgcatccagctgattgcgcttttcttccagctgcgcttcctgtttgcggatttcggaagagagccccgcttctttgtcccggtgcgcttcaagctgcgacttaagcgattcccactcgccatgcagcgattctatctcatacgccaaaacggcaatttcataatttttcaatgtttccttttgttccagataatcttttgcgaccgatgcctgcattttcagcggctcaagctggctttccagttcatagagaatgtcgctgacacggtttaagttatcctgcgtttcggcaagcttcacttccgcctttttcttgcgcgtcttatattttaaaacgccggctgcctcttcaaaaatgctgcggcgttcttccgctttgctgtttaaaatttcttccacttttccctggctgatgatggaaaaagcttctttgccaaggccggaatccataaacaattccacgatatccttcaaccggcactgctgtttattgatgtaaaactcgctttcccctgaacggtatacccgccttgtcacgctcacttcctggtaatcgatcggaagggcgcggccttcgttttcaagcgttaacgtcacttctgcaaaattcaacggttttcttgtatcgctgccggcaaagatgacatcttccatctttccgccgcgcaggcttttcgctgattgttcaccgagcacccagcggacggcgtcgatcacattgcttttgccgctgccgttcgggccgacaaccgctgtcacgcctgggacaaattctatggaaatccggtccgcaaatgacttaaatccgatcacgtcgagacgtttcagaaacaatccattccccctccattcctcacggcttctttttttcttctttctgcaaattggataaagccgtttgcgcagcctgctgttccgcttcttttttggagcggccttttcctgtcccgagcgccttgctgttcagcgacactctggagacgaactccttgtcatgcgcagggccgcgttcatcgagaatcgtgtattccaacacaccggatgttcttttttggacgtactcctgcaacttgcttttataatccgccgtgctgctgaagagcccttcgtctattttcgggaatacgactttttcaaggagggaaacaacagcctttaaccccttgtccaaataaagcgcgccgataaacgcttcaaacacatcggctaaaagggccgggcgcgttctgccgccggtcatttcctcgcctttgccgagcaggatatactcgccaaagtgcagctcattggcaaaaatgacaagagacggctcacagacgacggacgcccgcaatttcgtcatttccccttcgttcatcgacgggaaccgcttaaataaataatgggaaacggtcaattccaggacggcatcgcctaaaaattcaagcctttcattgtcgtgactgcgcttttccggatgctcgttcacataggaggaatgcgtaaaggcctgtttcagcaggtttccgtcttgaaaatgaatcccaagctgttcctgcagcttgccaaatttgtttactacatgttcttcatctgattttattttttttaccatcgttcatccacccgatatcttgatgtagtttcacttaacttaaatatatagaaaaatactgctgaacgcaaaggcatcttcgggacccgggcggtcgtaaataggcaaaaaggggttgcattttttgcccatttaccatcctcaggccggattagagaaaaatgtcccgcttatggggcgggacattttacatgaagacgattactgctgattttgtatgtaatttacagcgtcacccactgttacaatcttctcagcatcctcgtcggaaatttccattccgaattcatcttccaattccatcaccaattccactacatcaagggaatcagcgccaagatcttctttgaatttcgcttccagtgtaactttggattcttcgacaccaaggcggtcaacgatgatctttgtcacacgctctaatacgtctgccatgcggttcacctcccctcaaggtattatagaggattttttataattaataaagcgaaagttaaaatcaagctttgctgcaaacgttacatcaccattccgccgtcaacgtggatcgtttgcccagtaatgtagtcggaactgctgcttgccaaaaacagggcagtctttgccacatcttctggcttgccgaaacgggaaagcgggatttggcccagcatgccttctttaatgtcttccggcagtttatccgtcatatccgtctcaatcatgcccggggcaatggcatttacggtaatgccgcggcttgccagttcacgcgccgccgttttcgttagcccgatggcaccggctttggcagcggtataattggcctggccggggttgccgctgatgccgacaaccgaggcaatattaatgatcttgccgctccgctgcttcatcatcggccgcgccgccgcttttgtgcacaggaagacccctttcaaattggtatcgatgacggcatcccattctgcttctttcatcctcatcaaaaggttatccctggtgatgccggcgttattcaccaatatatcaagtttgccgaatttttccagcacctgcctgaacatttcctgtacttccgtttcattcgaaacatctgcccggatggcaaaagcttccacaccgaaagaacggacggcgtttgccacttcttccgctttttcagcatttcctgcataattgaccgcaatatgcgcgccggaagcggcaaacgcaagcgcgatttcacggccgatgccacgtgacgcgccggtcacaagcgcaactttgtcttttaaaagcattcggtctcctcctccattatttttgcagcgcgccaaccgcagcttccagggtttccatatcctggacggcatatgtttttacgctgcggtcaattttccggattaatccggatagcactttgcccggcccgacttcaataaaggtatcaacgccgaggctgatcatttttttaacggaatcttcccataaaacaggggaatagagctggcggattaattttgctttgatgtccacagcgcccgtttccacttcggcatcgacattggcgatcacaggaaccgccgcatcccggattgcaattccgtcaagaaccgccttaaacttttccgctgccggctccatcaatttggagtggaatggcccgcttacctgaagcgggaggacgcgtttcgcccctctttcctttgcaagggcgcccgctttttcaattccggccgctgtcccggaaataacaatctgtccgggacagttcaaattcgcgagctggaccgtttccccttcactgctcacttcttctgcgacttcctgcagcacgccgcggccgagcccgagcacggcggacattgccccggcaccgttcgggaatgcttcatccatgtattccccgcgtttgcgcaccgcatatacggcatcttcgaaggacaaagcgccggctgccacaagcgccgaatactcgccaaggctgtgcccggctgtgaaatctgcatggatgcccgcttcctgaagcacctgtaaaatggcagtgcttaccgataaaagcgccggctgggcattttcggtacgggtcagtttgtccagcgggccgttttgaatgagcccggataagtccatcccgagcttttcgtctgctttttgaaaaacagccgccgctttttcatttgcaccggcgaccgactgccccatgccaaccgtctgggatccctgccccgggaagacaaacgctattttccccatcttttttcctccatccttacttttgttcaagttgttgaattgcgtgtttgattttgccgatgacgtcagactgcaccatttcacgcgcctgccgcactgcattgtaaattgcattggcgtttgaggaaccgtgcgctttgatgaccggcgcattcagccccattaagcccgatcccccgtattccgagtaatccatgatatttttcaggcccgacagttctgatttgatcattgcagcggccaattttgtcttcaaattgtgcatgaacacttttttgatcatggaaaacaaggatccggccgtgccttcaatcgtttttaacaccatattgccggtaaacccgtctgtgacgacgacatccgccaccccctcgagcagatcgcgggcttcgacattgccggtaaaattcaaatcggtttcttttaaaagttgaaatgctttttttgttaattcattgcctttcttttcttccgtcccgatatttaagaggccgacgcgcggattttttaagcctcttaccttttcggcatacagcgagcccatgatggcaaactgcagcaaatgttccggcttggcttccgcgtttgcaccaagatcgagcatgataaaaccgcgcccgtccgttgtcgggagcaccggggcaagggccggcctttcaatcccttcaatcctgccgaccacaaagaggccggatgccattaaagcgcccgtatttccggccgagatgcacgcatccgcttccccgtctttcacggcctgggccatgcgcaccatggaagaattttttttgcggcggacggcccgcaccggctcgtctgtcccggatattacctcatcggtatggacaacgacaacgcggctggacgtttccagttccttcctgacttgcgtttcatccccgaacaggataaactctgtgtccggaaatgcgtttacagccttgttaatgcccagtacaatttcttttggggcataatccccgcccattgcgtcaattgctaatttcattctattcagccccgtttctaaatcaagcttttcccgtgtgaaagttttcccggccgtgcggcaaccggggttgccggtccctgggaaaatggttcacctgtccgcgtgaagcggcattaagcattctcttcttttccggcatgatcccggtacatttcaaattcgcctttaaagacgaggtcacggccgacataactttcaacaaacaccgtcgttctgccgttttcctgattgacgttcgccacttttgccttggcaatgacgcggtcgccgattttcacggaccgcaaaaaccggatggtggctttcgccgtgagggcaagttcatcatcaatgacggcaacggcaagcgagttggcctgtgcaaacagatgatgcccgcgggcgatggcgtttcgcttaaaaacgtgttcttttttgacatcaaaaatagagatggcgctgtgatccagttcgatatcgatcacttccccgatgacttcttcaatcggcagcgctcttacttcatttgcgaaccgcttttcagcaacgtttttgatcctttcccgcagttccggaatggaaagttccagccggtcaaggcggatcgtctgcacgctgacatgatatttatccgccagttcttcatctgtaataaaaggattccgcctaatggtttcctgcaaactttgctgccggtccttttttttcattttcatgggtgacaccatccgaaattttaggacttggtactaatcgtagtatatagaaagaataggaagtttgcaagaattgccaatagctgccctggcaaaacgcaaacttcctttagtccagtttttccccttccagcacacctgatgcttcaagctggttccgcaaatgcgaaaaggccgggccatgccagaatgcatcggaactgatcaattgctgtgcatcctgcctggctgtttcaagcgcccggaaatcatggaccatatcggccactttaaactccggcagcccgctttgtttttttccgaaaaaatcgccaggcccgcgaagctcgaggtctttttcgctcaaaacaaagccgttgtccgtttccgtcataattttcatccgctctttgccgatttccgttttcgggtcagcgagcaaaatacaatacgattgcgcatcgcccctgccgacgcggccgcgcaactggtgaagctgggcaaggccgaaccgttcggcatcataaatgaccataatggtcgcattcggcacattgacgccgacttcgacaaccgttgttgacacaagcacctggatttcgttgcggctgaacgctttcatgaccgcttccttttcatcgcccggcagcctgccatgcatcagcccggctatataccggccattaaaatattggtttaaaatggcatacacatcaatcgcgttctggacgtcaagcttatcggattcctcgatgagcggacagatgacatacgcctgtctaccttttttgagctctttttcgataaagctgagcaccctttcgaactgattgtttttcacccagtacgtttcaatctttttgcggccggccggcatctggtcaataacagaaacatccatttcgccaaacacggtgatggcaagcgtccgcggaatgggcgttgccgtcataaaaagcacatccggattcatccctttttcacggaggatccgtctttgctcaaccccgaaccggtgctgttcatccgtgatcacaaggccgagccgggaaaatgccacatcttcctggattaaagcatgcgtgccgattaaaatatcgacgccgcctgtaccgagctgttccaaaagcgcttttctccgtttcccttttacagtgctcgtcagtaaagcgacccggacgccgtgcggttcgagcagctggcaaagcgattcggcatgctgctcggcaagaatttccgtcggtaccatcaacgccccctgaaatcccgccgtcaccgcagcgtatagtgctatcgcagcgacgaccgttttcccggagccgacatccccctggagcagacggttcatacggaacggagacttcatgtccgcgcaaatttcgtttaccactcttttctgggcgtccgtcaatggaaacggcaaggagccgataaaatttcttaatttccgcacatcatagcggatggcccggccgtttgaatgttcgcgctcgaatttccttaacgcctgcatcttcagctgaaaagccaaaaactcttcgtatacaatggtccttcttgccattttcacttcctgttccgattttgggaagtgcatcgcatacatggcctgctttttcggcattaatttatattttgcaagcatttctgccggcagaacttcttcgatttcgccgccaaacgcgcgaaaagcagactcgatgtattttcgtaacgtttttaccgtcatttttcctttcacagcatagaccggcccgaatccggacgtttgatcggccgtgcctgtttttaaggattgggccgtaatcgtctgccggtgcatgtcccattttccggtaaccgtaatttcatcatgaatatggattttctttttcagatacggccggttaaaacagacaaccgtaatgagaaaatcgcctgcgaacactttcatcgacaggcgtgaccgtttttttgaataatagatgagggagggttcgctatgcaccctccccgtcaccgtcacccgttcatcatgccggacttcacgcaaatctttgagccggtcatcttcataccggaaagggaaataagtaagcaggtcataaatggtgaaaatccccatctgcccgagacttgcttccgtttcttcgccgatcccttttaagacggttaccgactgatcaagcgggctattcatgcagatcaagcggcataccgaaaatttttgcttccagtttccgggcggtcggcgtatccgccaggcctccacgcgccgtttctttgagcgcagtcggcatctgctgcccgacgcggtacatcgcatcaatcacttcatcgcaagggatccggcttttaatgccggcaagcgccatatctgccgcaaccatcgcattggctgctcccattgcattccgtttcacgcatggcacttccacaaggccggccacaggatcgcacaccaggccgatcatatttttcaaagtaatggccattgcatgggcgcattgttccggtgtgccgcccgccatctcgacaatggccgcggcagccatcccggcagctgatccgacttctgcctggcagccgcctgctgcgccggaaataaacgcattattggccaccacaaatccgaatgcgccggatgtaaataagaaacggaccatttcttcacgcgtcgggtgcaacttgtttttgaccgcaaagagcgttcccggcacaacgccggcagaaccggccgtcggcgttgcgcaaatcgttcccattgccgcgttcacttcatttgtcgcaacggctttgctgacggcatccaaaatggttgcgccagataagaaattgcctttttcaatatatttttgtagcagcacggcatcgccgcccgtaagccccgagtgggagtggacaccggcaattcctttttcaactgctttttccataacagccagattttcatccatcttttttatgatggcttccctggattttccggttacttccatttcctgctctatcataatttccgaaatttttttattttgctgttcggccagttctacaagctcagcaacattccgaaacatcattaccctccttcaatatccatgctgcttctcctggcacaggcaaggatgcacgcacatttcaaaagacagccaaaagaaagcgccacctgcttagcagctgcgcctttttctcacatctaatctacaactcttgcaacctgggtaatgttcgggagccgcttgatttcttcaatgacggcatcatcgagattctggtccacttcgatggccatcaatgccatctttccggcttctttgcgcgacacttccatatggccgatattgatttcatgtgccgataaaatattggatacggccgcaatcgccccgtagcgatcctggtggacgacaagaatggccgggtggtggccggataagtgcaactcaaagccgttcagttctgtcacttcaatttttccgccgccgattgagatgccggtcagttccatatctcccgatgcgtcgcccatccggatcctaaccgtattcgggtggtccgggacggcactttccacgagaaacttcaccgtaagcccgagctgttccgcaatctgaagagaagatttgatccgttcatcatccgtgtcaaaatcaagcaggccgccgacaatggcaacgtctgtgccatgccctttataggtgctcgcgaacgatccgtaaaaatggatgtctgcccattttggctgcctgccgaataagcttctcgccacccggccgatgcgcgcggcacctgccgtatgggagcttgagggcccgatcataaccgggccgataatatcaaaaacacttttatatttcattgcgcatcacacccacattattgtgctttttccgtaatttcaattgccggcgggcgcgcgccgtttttcaggccgcacccgccgttgtgctgattttaaagcttgccgggcaaaaccggatgttggtttggccggttcgccaggcatcctaagcctttttacaacaatggagcaaaagatgggtgaaagctttgcacttttaaaagcgctgcaacagatgaaaacaaacggcagcaaatggtgcactttttcgtattcagcaagctctctttatagtatgcaggcaagcacccttattccactgcaaaaataaaggaatataacggctgcctgccttcatggacttcaatttccatctccggccagttggtttcgatataggaaacgagttcgccaacctgctccttgctgacatcttttccgtatatgacggtggcaatttcatcttctgcgccgatcatgtgcgaaagcagctgcccggatgcttccaacagggcagggctcgttttgacgattttcccttcataaatgcccatataatccccttttttgatggagatgccgtcaatattcgtatccctgaccgcattggtgacctggccggatttcacgcggccgagcgcttcttccattgcttggacgtttttgtcaagcggctgcccggggttaaatgcgagcagcgccgccattccctgcggcacggttttagacgggacaatggctactttttcttccgccagttcagctgcctgctcgcttgccatgatgatatttttattgttcggcaaaatgatgatttgttttgcgttcgcctcttcaatggctttcaatatgtcctcggtgctcgggttcatcgtctggccgccttcaatgacaacatcggcgccgatgcttttaaacagcgcagcgattccgtcccccatggcaaccgtaatcacaccgtagtctttcttttcttttttctcccgttccgctccgttttcgccaacaagcgcatgatgcgtttcgccgacgatcgcgctgtgctgctcacgcatattgtccacttttaatttaatgaggctgccgtattgctgtccatagttcaaaacatcccccgggcgctcagtgtggacatggactttaacgatatcatcatccgaaatgacaaggagggaatccccgaagcggctcatatcactgcggaaccgctcctctgagaatgccttggcggacggtttcgagcggtcgagcctgaccatgatttccgtgcagtacccatatttgatatcctccgtacgcataaagtcctgcacatgcttatggtgttcggcgtttacgagctcgtccattgacgggatgacggacggtgtatccggcagctcttccccttttaactcggcaagaaaaccttcataaataaaaacaagcccctggccgccgctgtcgaccacgccgacttcttttaacaccggcaacatgtccggcgtccggctcagcgtcgttttcgcttccccgaggatcgcttccatgactgccgtcagatctttttcggttttcgccgtttgcacaccttttttggccgcttcccttgcaaccgtgagaatcgttccttcaaccggcttcatgattgccttaaaagcgctctcgaccccggcctgaaaagccgctgcaaactcttttgcggagatatgcgcttttgtttcaatcgatttggagaagccgcggaacagctgggacagaatcacgcccgaatttccccgcgcgcccatcagcagcccttttgcaaagcttgcggcaaccgcaccgatatgcgcctggacatttttttgcacttcctttgcaccggaagtcatcgttaaattcatatttgttcccgtatcgccatcagggacagggaatacattcagggcgtcaaccgtcttggcgtttgccgcaagatggttcgccccttgtatgaccatttctgcaaaacgctttccatccagtgatgtaaccacaaaatttcctcctcgttacgggttcgcgacacgcacgccctgaacgtaaatattaatggcgtcaactgataagccgactgtttgattcagcgtatattttactttttgctggacgttgcgggcaatttcggaaatttttgtcccgtagcccacaataatatacatgtcaatttccactctttcatcctgttgacgcacaatgacgcccctcgagaagttttctttgcgcaggatttctgtaatgccgtctttaatttgatttttcgaggccattccgacaatgccgaagcagtcaatggcggcacctcccgcaattgtggcgacgacttcattcgatatatcaatttttccgtaatgcgtatttatttcaatcggcataaatcgctcccccttatcttcactgtttccaaaccggatttgacctgctatcgccattgtactataagacagggtacatggaaagcagagcaggcctgcgtatgtgtcaagtttttctcgacaaggtttaaatatcgggtattccaagacactctttttgtacannnnnnnnnnnnnnnnnnnnnnnnnnnnnnnnnnnnnnnnnnnnnnnnnnnnnnnnnnnnnnnnnnnnnnnnnnnnnnnnnnnnnnnnnnnnnnnnnnnncaatgggacattgagagaagcctatctgaaacaccgttcaagaagcgagagaaagcaacggaacttgaaacaatccatcaggatgtctcaactactcaagcagcctgtacgcccgtcagtgggcgtaaagcacggatcagttgccctgcattcaagcagttcatcggcaatgggacatttaagcaaaatattagagctttcattttaagcctggctcagtggggactgatcgttgaggcgcgcgaaatttacgagactcctgcgggaaaagcgagccaggagagaccccgcagcgaggtacgagcgaggaggctcgccggccgcccgcggaaagcgagtgaatttcgcgcgcctcaacatccccgttgtccatctttatacggaaatatcacatcttttccgaaaattacaccgagcaagtgaagcacggtagccgaaagtgtacaaaaagagtgtcttggaatacccgatatttaaaccttgtcgagaaaaacttgacacatactgcactctggcaggacttgcattgtgccttccaatatgataaattattatagtgaatttttaacgaaaaatgaagagatgaaagcataaatatgttctatttctgcttcgcaacaggaggagggaatacaatgccgaaaaaatgtgcaattacaggacgtaaaacggtatccggcaataaacgttctcacgccatgaacgcaaacaaacgcacctggaaagcgaacttgcaaaaagtgcgcattctggtggacggcaaaccgcaacgcgtctgggtttccgcccgcgctttgaaatccggaaaagtcgaacgtgtataatgcaaaaacaggaaaccgggtatccggtttcctgtttttttgtaatttgcggcaaaaaaaaaccggcgcgccgccgattttcccgctgtataaaatgaactgccccttctaaccgccatgcgtcgattttatctcttacccttttttaaaagtccccagcatggcccttacaataccgcccaaaaatttaggcagtttaatcgtataaaatttcatgtatgtccctccccattcaaatacaatccgggtctcccgcacattatattcatgcgtaagcgaaaaggatacagcctgcttgttcatgaaatatcattaatcatggcttcttaccatcattaatatgccgcttgaaaaagaaaaagtaccaaaatcccggattagttcattgctgacacaaagggtggtgccccttacaatatgccgattttcaagcggatacttaaatccggttaatgagatcccttctacttcttccgtcaacgggagaaaggaaacatacggatacgcatcgattttttcaattgtataagttccgggcaaaaacatttccacgcggttctgcctgtcgatcatctctattttccctttaaattgcaaaactttttcatgcacaagtaaaaggacattggtaaaagcatggtcgagccgcccgccggtagcgccgagaatgcggatcacttccgggttccggctgatggcccacatcaaggccagctccatatcggtctcatctttttcgggctggaatttccggatatgctgaagtttccggttgatccagccccattcttcctgattgacggaatcaaagtcgccaaaggccatttccgggatgatcccttgtttaagcaaatgcagcacgcccctgtccacacccgcccatgccgcctgtttgtcctccgcatatggcgcaagatccggcacattttcgggcgggccgcctgctaaaatatagattttcttttccatgcctcattccccttttatacgatggatttaagacaatctttgtccgctccccgcaggcttttcatgcggaaaaagccggatgaaccccggctgttgttttactgcccgtattttaatgcccggatcgcttgtttccggttcttgcttttaaaaatattggagcccgcaaccagcaccgttgcaccggcctgtttgcatttttgcgctgtttccggatcgatgccgccgtcaacttcaatgtcaaatgcaagcccctgttcttcttttaaacggtacagtttctcaattttcgggacaacggattcaataaaagcctgtccgccaaacccgggattgaccgtcatcagcaatacaaggccgacatcccccaggatcggcgcaatccattcgatgggtgttgcgggatttaagacaacgcccggatttaccccaagagaccggatttcctggatcgtccggtggagatgcctgcacgcttccacatggacagaaatcgtgtctgcccctgctttcgcaaaagcttccaaatactggtccggattttcaatcatcaaatggacgtcgagcggaagctttgtgaccggccgcaccgccccgacaacaagcggccccatcgtaatgttcggcacaaaatggccgtccatcacatcaatatggatccagtccgctccgccttcctccacatctttaatttcctctcccaatttcgcaaaatttgcagacaaaatagagggtgcgatttttaccatcgtcaatacctcggctttctgtttttaatttcctgaagaaactggatgtaatggctgtaccggaatgaagcgatctccccttcggccaaagcagcttttaccgcacaatgcggctcgttttcatgcaggcagccgcggaacttgcagccggccgatttttcactgatttcaggaaaatagtccccgagctcggataattccacaccagtgaagtccagtgagctgaaacccggcgtatccgccacgagcccgcctccgaccggcagcagttcaacatggcgggtggtgtgcttccccctgcccagatgcgtggagatttcatttgtttttaaatccaaagcagggtccagacggttgagaatggacgttttccccactccagactgaccgcaaaagacggtgatgtttcctttcaatgccgaaagcaaagcatctatcccttcgcctgttttcgccgatgagaatataaccgggtaaccgatttgccggtatacttcaagcgtaccgtgcagcctttctctttcctccgcgcccaggagatcgcattttgtaatcagaatgagcgggcggatcaggttcttttcaattgggactaaaaaacggtccaaaagcagcgtatgaaagtccggttcttttgcggaaaaaaccaaaacagcctgatccacattggcaatcggcgggcgcacgagttcattctttctttcgccgatgtccaaaatataaccttcccggccgttttctttttggaattcgacatggtccccgacgagcggggtgattttctttttccggaagacgcctctgcccctgcattggtaaatttcgccgtcttcacgatttttcacatagtaaaatccgcttaaagccttgatgatttttccttctgccatacatccacctccatctctccggcgctttcaaatcggggaggcgccggggtacggcccggcgctttctcagtttggatacggaacggtctcttcggcgatgactttgccgtccctcatgattttatatgttgcctctttcccgtattcaatggtaaactccagctgctttttcaccgttttcgtaatctcaaacgtttgaacaggtgcggacatcgaatggttcatgtcttcaatataaatttgcacttcctgtttcgggtcttcttgtgcagttgcatctgttttgctgccggcatcatttccgcttgattgcccgttgctgtcaccgggctggctgtttccatccgaaccggaacttttgctgtggttttcatttgtgctcccggcggaatccgtatccggctcatacgggatcgttacttcttttgtaaccgtctttggcggcatttctttctgccctttgctgatggtcacttttactaccgagcccttcttcagctcggttcccggctgcggggattgcgaaatgacatggtcctttttcacggtatccgaataatcttttccggcatattcaatggaaaaaccggatgttttttcatatgcgtccaactgtttttttgaaaacccggttaaatccccgattgcataagtttccgggcctttgctcacagtaaaggtaagcaccgtgctttccggcaccacttttttattgggcgcgggatcctgcgacaaaatggtcccttgtgcactgtcatcgtacacttcttctttatcgatgtctttaaaatgttccccgctcaataaattcacgacgtcgtcaaactgcctgccggtataatcggacagggcaaatgtttcttttcccgtgctaatgtaaagggaaacttttgtcccctctttgatttttttcccggcttcgggatccgttttgatgacctgcccctttggtaccgtttcgcttgttgttttaatcttctccccggttttcaggccgtgcgccgtaagcacggcgtcggcagcatcagccgttttgcctgatactgccgggacgctgacggttttcgggccgagcagagacggcagcagcaaggcggcaaggccggcaagcacgagcagaaaggcgagagcgccggcaacgaacggccatttttttcgccgttttttctcttttttgtcccgctttgtgtccggtttcttttcttttttattttctccggccggatttgcgataatggtttcttcattccggtcggggccggcagccacttcggaaatcaccggcataattttcgtctgatcttcgtcttccggaatcacaaatttcggttcattgagcctttccggcaggagtgcggtccggatatcctcccccatttcttcggtgctgttataacggtaaaacggatctttcgccgttgcttttaaaacaatattttcaacactttggggaatatcgggattccaccttttcagcgacggcgtctcgctttgcaaatgttttaaagcaatggaaacggcagattcccccgaaaaaggaatccttcccgttaaaagttcgaacatcacgatgccgagtgcgtatatatccgatttatatgtggcaacaccgccccttgcctgctcgggggaaagataatggaccgaaccgagcacggcatttgtccgggtgatcgaagtagcggatagagcgatggcaatcccgaagtccgtaattttcacaacaccgtcatggctgattaaaatattttgcggcttaatgtcacggtggataatatggttgtcatgggcatgtgcgatcgccgccgcaagctgccccataatgtccagcgttttctcaacggaaaccgggccgttttgctgtatgtattgttttagcgtcatgccctcgacattttccatgacgatataatttaaatcatcctcttcgccgatatcataaatactgacaatattcggatggaccaggctcgttgccgattgggcctccctgtgaaaacgctggataaactccggctcatctgcaaaatccgggcgcagcaccttgacggccacatcacggtccaaaatcatatcgcgggccagatagacgtttgccgtgccgccgccgccgatcaggcttttgactttgtagcggccgctgatccgtcttccgattagcatgaatggcacccgcctttattgcggccggacgccagaagcacaatcgtaatattgtcttccccgccgttttcattggcataatccacaagcatttccgctttcttcccgagcggcagatctttttcaagcacttctttcatcacttccgtcggcactttattcgacaggccgtctgaacaaagcagcaaagtatcattttcttcaaatacaatcgtttttaagtcgggcgagatcgaatcttccgtcccaagcgccttcagaatcacatttttatgcgggtgattttcggcatcttcttttgaaatctggccggttttgacgagttcattgaccagcgaatgatcttccgtcagctgttggaagccgttttcattaaaaatatagccgcggctgtctccgacattggcgatggaaataaagcgctcggtgcagaccgctgcaaccagtgtggtgcccattccttcgcattcagggtgatgggcggcatgatcaaataaacgggcattcacctcgcggatcgtctcagaaagccacgcctctgcagattccgcatcggcaaccgggccgaatttttcaaacgcttctttaaaacattgcaccgtcatgccgctcgcaatgtcacccgcacgatggccgcccatgccatctgcaacaatcgcaaggagatcgccgccggcattttcaaagactcccccattgtcttcgttatgctgccttactctgcccttatccgttttatagacagattccattatacccccaccttcatactctttgacgtgtttatcatcgggcaagcctatgctttaccggcctttttgcggatactggcgatgaaaaaaccgtccccgccgaagtcctgcggaaaaatctgcatccggtatccgtcaactaaagattccattgcttcagggacgtgcagcggatacggttcaaattccggatgttcctgcaaaaatgtttcaatcgtcccttcattttcttcccggtcgacggtgcaggtgctgaaaactaagatgccgtccggttttaacagtcccgacacgcccgataaaattgaaagctggacctgctttagcgcatggatatcgtcaacggttttcgcatatttgatatccggtttccgccgcagaaccccaaaacctgtgcacggcgcatcgacaagaatgcggtcaaaagtggttttttcaaaatgggcgcctgcattccggctgtccatcgcaaccgcttcgacctgtccggtaccgagcctctctgcgttttcccggaccagtttggccttatggggatggagatcgagcgcgattacttcccccgttccttccaacttttccgcaatatgggtggtttttccgcccggtgccgcacaagcgtccaaaatccgctggccttcctggatgcaaagcgcataggcaaccgccatcgaactttcatcctggatggtgaagagcccttctttaaagcatgccgagcgggcaagattaccttttcgcgaccggacagcttccggaataaccgggctccgctcaacggtaaacccttcccgtaccagtttttcgatgacttcttccacggatgcccggttcaggttcacccttgctgtctgtaacggcggaatcaggtttgcttcacacatttctttcgttgttttatagccgtaagcttccgcccatcttgccacaagccagtgcggatggctcgttgccaccgataatctttcaagcgggtcttctatttcctttaaacttctgagccccccgcgctggatggcgcgcaaaacgccgttgaccattccggaaatcccgcggtggccgcgttttttggcgatttccaccgcttcaaaaataatcgcgcggtcagggattttatctaagtataccatttgatatatagacaagcgcaacaaaatccgcacccaattttcaatttttttgcgcaaaaacggggcgagaaaatagtccagtgtctgctttctctgcaacgtgccataagtgatttccgtaagcagcgcccggtcagggccgtggaaccggtatttttcaatatagcggtcaagcagcaaattgctgtacgactcgtttttctccactgcctccaaaagttcaagcgctgcttcgcgaacatttttccggtctttactcatcttcatctccaaatttcatcccgggtgcaaggccgcccgctgaaccgtttaaaaattccgcaaccgccatccgtttcttcccggcaggctgcagttccgtaattttaatgccagttgtgctgcccgttgcgaccacgatcccgtctttttttatcgtgacgatggtgcccggttccgcatgaacggaaagcggcactttttcgctcttccatattttaaacgtttttccgccatgtacggtataggcacccggccacgggcacaggcccctgatttggttgtaaatggattcccccggttttttccaatcgattttttcctggctgcgcgtaatattatgggcaaacgtcgccttctgttcatcctgcggcaccggcacaatttcttttgccaggattttcggaagcgtttcggataaaagcatagcacccgctttgctcaacttgtcatggagggtgccggcatcatcggtttcttcaatttcgacttcccgctggctgaagatgtcgccggcatcgagtttttccgccatatacataatggttacgccggtctttttcttcccttgtaaaatggctgtatggatcggcgccccgccgcgcagttccggaagcagtgacgcatggacattaatgcagccgaacgggggcgcatcaagcaatgctttcggcaaaatctgcccgtacgcgcatgtaaccacaacatccggcttgagtgccaaaatgcgggcgaggctttccggctggcgcaatttttccggctgaaaaaccggaatgccgtgcttttccgcctcccgttttacaggcgggggcgttaagatctgttttctgccaaccggcctgtccggctgtgtcacaaccccaatgacctcgtacccgtcgcggatcagcgtctgtaaaaccggcacggcaaagtccggcgtccctataaacaccactttcgtcattcggtatcatcctcctcaaaaaccaagtcttcctcatccacataatcgatgattttggacgtaaacaaaacgccgtgcagatggtcgatttcatgctgcaaagcgcgggcaaggaaatcttccgcttcaatcgtgaacgcctttccgtttgcgtcctgtgcttttactttcacataacgggcgcgttgaaccgtgccgtaaacgccgggaaagctcaggcagccttcgacatcggtctgttccccgcgccttgttacgatttttggattgatgaggtcaatccggcctgccccatcgccggtatcgacaacggcgatttgctggctgatgccgacttgcggagcggcaaggccgaccccgtccgcttcaagcatcgtttcatacatttcatccagtaccgcttttaaagacgggccgaatgccgtgacccgtttgcatttttccttcaaaacagcggcaggatattttacaatctccatcatttcgaatcactcgttcctgttacatcatcatattaggattgacatcgaccgcgatgcttaatccttccgaggcaatctggtgctggaaatgttccagcaaaacagataatgtttcattgagccgcggttcccgtttgtattttatcagacattggtaacgatatctatttttcacacgggggaccgggcatgccgaagggcctaaaatcacacttccgcccgacacccgattccgcataaagcctgcgattttttcggatgcggacatggcttccatcacattttcatggctgaccgtaatcagggtgagatagtaaaaaggagggtaggcgcccactttccgcattctcatttcctggcggtaaaagcgttcatagtcctgctcccctgcaaattggatgctgtaatgttcgggggtatatgtctggacaacaacctcgccttccagctggtgccgccccgcgcgcccgcttacttgtgttaaaagctgaaacgttttttcggacgccctgaaatcgggcaaatggagcatcgtgtccgcattcagcacgccgacaagcgtaatattcggaaaatcgagcccttttgcaatcatctgcgtgccgagcaaaatatcggcttccccgtttgcaaagctttgaagcatccgttcatgcgcccctttccggccggttgtatcgacatccatccggatcacgcgcgcttcaggcagcagccgcccgagctcctcttccactttctgcgtccctgtcccgaaatagcggatatgggaactcccgcattccgggcatgttgcgggcacaaacgtctcgtaaccgcagtaatggcatttcatttcgtttgtggagcggtgataggtaagcgaaatatcgcagttcgggcattgctgcacatacccgcagtcccggcacatgacaaaggaggaatatccccttttatttagcagcagcacggtttgctgttttttctccaggcgctctttcagtttttcaaaaagctctcttgagaacatggaacggttgcctgcgcgcaattcttcgcgcatgtcgacaatcgaaacttcgggaagcgggtggttgttcatccgtttttccattttcagcaacgtatagacccctttttgcgcgcgggcaaatgattcaagcgacggggtggcgctgccgaggataaccgggcaatggtggtttttgctccggaaaagggcgacgtccctcgcgtggtagcgcgggttgtcttcctgcttgtagctattttcatgctcttcatcaataataatgatgccaagattttcaaacggggcaaaaatcgccgaccgcgccccgaccaccactttcgcttctttgcgggtaattttccgccattcatcgtatttttcaccgaccgataagccgctgtgcaaaaccgccacatctttgccgaaacggcttttaaaacggttcaccatttgcggcgttagagaaatttccgggacaaggacaatcgcctctttcccctggttcagcacttcctgtatcgactggagataaatttccgtttttccgctgccggttacgccaaaaagcaaaaacgtttcgtttctgttttcgcggaccgcggaaaggaccgggccgattgcctgtttctgttccgcagtcaaagcatgcggcacgctcttttgaaattggcggccggcatacgggtcgcggtacgattcttcctgtgtttctgccagccatcctttttcaagcaatgttttgataaccgcccgcgatacgccggctgtttccgccagttcgggagaaggcatctttgcatccggattttccaggaaaaattgcagcacctgcttttgtttcggggcatttttcggcactttttccatccgtttttcgagctcgcctttggaactcgggcagaaaatgagccggaccgttttcttgttggctttgcttttgacttcatatacgacttccaccgatccgtttttcgcttctttttgcagaaacggcagaaagcccttttgctgcgcttctttccatccgatttcgccgctatccccgaacacttcgtcaagaaaagggttggcgcccccgtcctgccttttgatgcgtttttcgtattttgccttcatcgcggccggcagcatcgcctggtaagcagagattttcaggcaaagcgtttcctttgcaagccagtccccgagcgcaagcagctccgcattcaaaaccggggccaaatcctgcggcgcaatgatttcacgcaagttcttcacttccgaacggtcttttatgcccgcaacaaatccctggatcgtgcgcgggccgaacgggacaatgacgcgcattcccggttggatggccgttccccatttttccgggatccggtaatcaaaatatttatccgtctgcattgccggtatatcgacaatcacacttgcaatcttcatttcttttcgtccttttcgatctcgcggcagatttcgcgcaaaatttcccttgccgcctcatgcttggaaagcagcgggagttcccgtttcgagccgtcgcgtttaaaaatggtcacgatatttgtatcgccggcaaatccggcgccttcccggctcacatcattggcgacaatcatatccgcacgcttccgttccattttgccgcgcgcatagttttcgagatgatcagtttccgcggcaaagccaacgagaaaaggcttgtccagcctttcgccaagttcttttaaaatatcttttgtccgtttcagttctagcgtcaggttgcccggctgctttttcatttttttatcgaagacacggaccggcgtgtagtctgccacggccgcgcttttaatgatgatatccgcttccttgtagcggcccatgaccgcatgatacatctcctctgcgctctccgctttgatgatttccgttccggcgggcggtgccagcgtgtccacgcttgtgacaagcaaaacgtttgcccccatattggccgcttcttcggcaagcgcaaatcccatttttccggacgaacggtttgaaagaaagcggacgggatcaattttttcaatcgtcgggccggctgtcactaaaaccgttttcccggacagcggtttcggcccgccgctgaaaaaatctttcaaaagcgccacgatgttctccggttcttccaatcttccttttccggtatagccgcatgcgagatgcccgtccgcaggctcgatcagccggtagccgaagcctttgagcgtttccaggttccgccggacagccgggtggccgtacatatggacattcattgccggcgccacccataccggcgcagtcgtggcgaggatcgtagtcgagaccatatcatccgctattccgttcgccaattttccaatcatattcgcggtggccggcgcaatgaggacaagatccgcccagtctgcaagatcaatatgggcgattttctccgggtgtttctcatcaaatgtatcggtgtacacttcattccgggaaagcgcctgaaacgttaacggcgccacaaacttgcaggcggattccgtcatgatgactttcacatgtgcgccggactgcgccagcttgcttgtgagcgcagccgctttaaaaacggcaatccctccggttacgcacaataatatatttttcccaagcatccgtatgccccctgtaaagtctcagtcaatatccttacgaccattctaacaaaaaagcaaatataagaaaaagggctgacgccatatccgccagtccctgctctgtgattttccgtataaccgtaccaagataacttaagaagccgttccatcgtgtttgatccggaggacgccggcataaatttcttcaagcgccttgccgacatttttatcggaaacatatttttcaagcacttcgttatgctggtcctgcagctggcgggcacgttttgccgcgatcgtgacaagggaatatttcgaatcgataattttcaacagttcatcaatggaaggataaagcatcttattcaacctccagaatttttttatacagcttcgcaacgcgtgccgtccggcaatgttccgcgacgacaatggctttgattttttcgcaggcgttttctattgtatcattttccacaacgtaatcatataaattcatcatttcaatttctttgcgggctttttccatccggtcgcggatcctttcggcagattccgtcccgcgctgcgtgatcctcgattccagttcggacaaactcggcggcgcaagaaaaataaataagccgtccggaaatttttcgcggacctgccgcgcgccctgcacttctatttcgagaaaaacatcttttcccgcttccaatgtttccttcacataatcgaccggcgtcccgtaataattgccgacatattccgcgtactccagcagttttccctgcctgatcagttcttcaaattcttcgcgttctttgaaaaaataatccaccccgtcgatttcgccttcccgcggttttctcgtcgtcatcgagatggaatattcaaatttcgtatccggctgcgaaaaaatggctttccgtacggtccctttcccgacaccggacggaccggataacacaatgagtaatccttttttcttcaacgctatacctcctcgccatctgtttccccgtccgtgacacggtgcgccactgtttccggctgaactgcggagagaatcacatggccgctgtccatcattatcactgcccgggtttttctgccgtaagtcgcatcaattaaagtgccgcgctcgcgtgcatcctggatgagccgcttaatcggcgctgattccgggcttacaatggaaatgatgcggtttgccgaaatgatatttccaaagccgatattaatgagtttcaccacctgcatcctctcccgctcgcatacaattggctttgcgcgaatcattctatattctgcacttgctcgcgcatcttctcaaggaccgttttgagctcaacaacggctgttgaaataccggaagtatttgctttcgatccaatcgtgttcacttccctgttcatctcctggatcatgaaatccagttttctgccgattggctcatcaagcgccaatgtttcgccaaattgaatcaagtggctttcaagccttgtcacttcttcatgaatatcggatttgtcggcaaacagcgctgcttcctggacgagcctcgcttcatccagccggccgcctgatagctcctgcatccgcttttcaagtttgaatcggtatgtagaaacgagcgactgcgcttctgttttgatatgatccacctgctttgaaatcgtttggaggtgtttttccaaatcagttttgagcagggaaccttctttttcgcgcataagccgcaactgcccggccgcctctttgcaggcttccaggacaagggtgaggatttcttcattatcttcctctatttcttctattgtaactaaatcttcgcggtttaataactcgcgaatgccaaaacctgattcaattccgtattgctcacggatccggcttaaaaaccggtggtattcgtccagcaaatcccagtcgacccgcagcctgcgtttgacaagcccttcaccgaaaatggtgacaaacacgtcaatacggccgcgttgcacatagttcccgatgatttttttcaactcttcttccactttgacaagctgcttcggcatcctgatctgatattcgcaaaagcgatggttgacagacttgatctccaccgtcacactgaactgccgcgtctcccggcggcctctgccatagcccgtcatgcttaagaccatcttctcacgcccaatctcttcttacatctaccatcacgccggttttaaccttcacgactttcatcgcgcctgtccccggcccggtgataatagcttttacggagattataccgcgccccgcccatttaggaaaggaaatcttaaccggagcgcctggggaaatttcgccaaaagaaaaagtaatagaggatcccctattacttttaagattatagcataattcaaggtttttttcttaaataatatgtccctgcaagcaaaaatgtcggaattgcactcatgcagaggacgagcagccagtctttcggcaatatcggtagcgtatggaaaaccggctggagggccggaacataaatcacggcaagcataagtaaaaccgatgacaaaacagcaagcacaagatagacatttccaaacgggttgcgcgcgagcaccgagcgttcgctgcggcagtcaaacacatggatcagctgggcaaggacaagtgttgcaaatgcaatcgtttgtgcataagcaagccggtcggggtgctggtaatatacggttacaaaagcggcaagtgtcgcggacccgatcagaaaaccgcgcgaaatcactttccagccgagcccgcgcgcaaacaccccttcacgcggatggcgcggattccgcttcatcacatcttcttccggctggtcgaggccgagcgccatcgccggcagcccatccgtcacgagattgacccaaagaatttggatgggaacgaccggaagcggcagggacaaaagcattgcaaacagcatcacaaggatttcaccgacattggaggcgagcagataacggataaatttccggatattttcataaatattgcggccttcctggatcgccgctttaatcgtcgcgaaattatcatcgagcaaaatgagcgaggaggcttcttttgcgacatcggttccggtaatgcccatcgagatgccgatatcggctgttttaatggccggtgcgtcattgatgccgtcccctgtcatggcaacgactgccccgcggttttggaaagctttaacgattttcagtttatggtccggcgatacgcgcgcaaacacggaaacttcgtcaatcacgtcttccagctcatccaccgtcagttcgttcagcatcgtgccgtccaccactttttcatggcttgtgcgcaaaatcccgagctgcctcgcaattgcttttgcggtcacagcatggtcgcctgtaatcatcaccgtccggatgcccgcttccttacattctttaatggcttgtctgacttctggccgcggcggatcgatcatcccctggacgccgataaaaatcaaatttttctccgcctcttgttcactttttgccgtttctcctgctgcaagcggcttgaacgcgatggcgatcgtccggagtgcctgggcagccaaagattcgaccgctttctctactttcctccgtgtttccagatcaaacgattgttcccttccgttccagagcaccgaccggcttaccccgagcagcacatccggcgcgccttttgtgatcacaaaccgtttgccgtgtttgtcacggattaccatgctcatcattttccgcgttgaatcaaacggaaattcctgttcaactgtaaaatctttcagcagtaattccctcgttaaaccggccttcagggcggaaacgaggagcgcgccttccgtcgggtcgccgtctatcacatattctttgtttttcactttcaattcggcatggttgcataatagcccgaacgtcaaaagctggtagacgcttttttcctttaaagggtggatttccgttccattgtccgtaaaaatccctttcggctcatagcccgtcccggacactttccacgtctttccgccgctccataaatgggtgactgtcattttgttttgcgtcatggtgccggttttatccgagcagatgactgacgcacagccgagcgtttccaccgccggcagtttccggacgatcgcgtttttccggatcatgcgctggacgccgagcgataacgcaattgtcacaatcgccggcaggccttccggaatcgccgcaaccgcgagcgaaactcccgccagaaacatggaatacaagtcatgcccgtgccagacgccgacaaggacgacaaggagggttaaaagcagcgccaccacgattaaaatttttcccagctgctcgagccttctttgcaaaggggtcgccatcgattcggcgttttgaatcatatcggcaatttcccccattgccgtctgcatcccgatcgcggtgacgatgccgatgccgttgccgcgcgttaccatcgtccccataaacgccatattatgcaaatcgccgaggcccgcattttccacaggaatcggttccgttgatttcggggaagggatggattctcccgtcagcgccgactcttcaatttcaagattattagcctttacaatccggacatcggcgccaacccggtccccgctttcaaattttaaaatatcgccaagcgtcacttctttcgaagggatttttacccatcgcccgtttcttcgcacattgacttgcggtgcggaaagttcttttaatgcttcaagcgatttctcggcccgccgctcctgaaaaaagccgagaaacccgttaatcaatacaatggcgatgatcgcgaccgcatcgacatattcgcctaaaaatccggaaatcacggttgcggcaagcaggacgagcgtcataaaatctttaaactggctgagaaagagcataagggcagattctttttccgcctcttccagttcattaaacccgtactgcctgactcttttttccgcttctttttcggtgagccctttttccagatcagttccgaattcctgttctacttctttttcactcatttcgtgaaacatcatgaaaatacactctcccctgcttctgcccattattgtcttaatagcaacatattcagccctgtccaaaaaaatgatataatttaacatgccaacgaccggcgcaatgcttaaaacattgcgcgaaagaattgaggaatgcgatatgtcatttgacggattatttacaagagcgatggtaaaagaacttgttgatacgataaagggtggacggatgaacagaatccaccagccgtaccagaatgaactggtcctgatcgtgcgtgcaaacgggaaaaaccggcggctgcttttgtcggcacacccggcctatgcgcgcattcagctgacggatgaaccgtttgacaacccgcaggacccgccgatgttttgcatgcttttaaggaaacatctggaaggctccgtgatcgaggatatccgccaggccggccttgaccgcgttgttgtctttgacatcaaaagccgcaacgaaatcggggatatttcctataaacagctgtacgttgaaatcatgggccgccacagcaatatcattttggtcgacaaagagcggaacctgatcatggacagcatcaaacacgtcccgccggctgtgaatacgtaccggacgattctccccgggcatgaatatgtcatgccccctgagcagcacaaacggaatccgcttgaagcaacaaaagaggatgtcatcgcagcgctcgactggaacagcgggaaaatggacaagcagattgtcgcgcaattcgccggggtctcccctcttttggcaaaagagatcatgcaccgggcgaaattttcgaatccggaagcggtgacggacgcgttcttgtccgttatggagccgattaaaaagtttgacctccagccggtgatgatcatgggtgcacaaaaagaatcattttacatgatcccgcttacgtcccttgagggcgaaaccaaaactttcccgactttaagcgcgctgcttgaccgtttttatgccgggaaagccgaacgtgaccgcgtcaagcaaaaaggccatgatcttgagcggtttgtgaaaaatgaactggagaaaaacgaaagcaaaatcaaaaagctggaagccacgcttgaggaggcgcaaaatgccgaacagttccagctgtacggcgaacttttgacagcaaatttgtatgccgtgaaaaaaggaatggacaaagtgaaagtgcaaaactattacgatgagaacggggcaatggttgaaattccgcttgatccactgaaaacccctgcggaaaatgcgcaaagctatttttcccgctaccagaaagcgaagcatgcgcaagtcgcagtgcgtgaacagatcaaaaaagcccgggatgaagtgctgtattttgaaaacctcctccagcagcttgaaacagcctcgccgaaagatatcggggaaatccgcgaagagctggaagaagaaggctatttgaaaaaacggcacagccgcgcccggcggaaaaatgcaaacaaaatcgccctcgaaaaatacgaggcttcggacggcacggaaattcttgtcggaaagaacaacaagcaaaacgattatttgacaaaccgggtagccgcccgcgatgaaatctggctgcacacaaaagacattcccgggtcgcatgttgtcatccgcagcaaaaacccggcgccggaaacgattttggaagccgcatcactcgccgcctattttagcaaagcgcgccagtccgcttccgtcccggtcgattatacgaaagtgcgctacgtgaaaaaaccgaacggcgcaaaacccggatttgtcatttacgagaaccagcaaaccgtttatgtcacaccggataccgacaaagtgctggccatgaaaaaaacgaaggatgcatgaaaaacacggaatatgttgtaaacagcgcaggcccaggcattgcgctgttttttttggtaaaaaaatgttttcggaaacgaatgatctaaataaatcccaaaatattgaaatggctgccttgatttattttgtcagatattctatcattttagaaaacaatttatatttggaggtcttcacatggcaactttagaaaaaatcagcgcgtttgcagggaaaacgttcaccgtatgggtgctgatttttgcagtcatcgcttattttttgccccagcattttgcgtggatcgggaattatatcgtaccgttattgggcattgtcatgtttgggatggggctgacgcttgaattatcagattttaaagaagttttcaaaaagccacttgaggtggcgctcggcgtcatcggccattttgtcatcatgccgcttattgcttttctgcttgcagtcgggctcaacttgccgaaagatattgccatcggcgtcattcttgtcggttgctgcccgagcggaacggcttcgaacgtgatggtgtttctcgcgcgcggaaatgtggcgcttgctgttgcgatcgcctccgtgtccacgattcttgcgccgattgtcacaccgctgttaatcctgctgtttgccagcaaatgggtgcatgtcagtgtatggtctttattcctttcggttgtgcaagtgatcattgtgccgcttttgctcggatttatcgcgaaaaggtttttcggcaaacaggcgcgcgccggcgcaaaagcgatgccgcttgtctcggttgtggcgatcgtgctgattgtagcgggagtggtcgccggaagcgccgaaaaaatcgcacaaacggctttactcgtttttgctgtcgttattttgcataacttgcttggctttatcatcggctttttcttcgcccgtttgtgcgggatggaccttgccaagcaaaaagcggtttcgatggaagtcggcatgcaaaattccgggctcggcgttgcgcttgctaccgcgcatttttccccgattgccgccgtcccgagcgcgattttcagcgtctggcataatttgtctggttcgttgctcgcaaacatctacagccggatgaaagataaaaaggcagtaaaacccgacgcgaacccggccgcaagccagcatgtgtgagaaaaagaggggctgccctgcgtgcgcaggccggcccttttctcttatacgccccgtttgttcccccacaccaatgcatgcaattggggaaggacataagcatcattcatttcttctgcctgcaaggccagattgatcagccattcatatcttccggtcagcattttcgctaatgcatcccggtcaggcaaagtaacatccggattgccgacttgtaaatagaagggaacaggcggatagcgtttatggatctttttggcgtaatcaaaatcctcctcgtcgaaaacaacaatttttaagcaaaaatggctccccgccattgttaactggccaatcatccaatccaaagcctcaaaatctgtgtccatgccggaactcggcggttttggcgaaatggtcacatcatcaacgtccggaagccaattttgccagcgtgatccctgtgtctcaactgctgtgcggatatgatgcgttttcagcaaatcaaccagttcgccaaggccttgcaacaaaagtggattgcctcccgaaatcgtgacatggctgaagttttcccctcctgtttcttttagcttccggaagatctcctctgccgtcatcagcgcaatccggcttttttcctccttcaataaagttcaattatctctcatttactcgcatattctccaaatttcataggtatttgatttacacctaatcgttgtcacacctctaaatagatataagcagaattttcttgcagggtaaggtccatcctaacaaccaaattggatatatttggtaaacgaaaaggtataaccgtgcataaaatctccacacaactcacggtcgctcaccctcctatgtctcccaggatcggggtccacacattccttcgtcctgcgtatccatgaggtggaggccggatatgctcctcgactgggtcataatgcccgaatggaataaataaactccggctctgcactattggtgtttttattcggaataaagctgtatttaagagctaccttgcttttttaagctacctgtaatgtttctatttgaggcaatccttgcaataattttgccccatcaaaatcgcattgcttgttgccgatggcaaacaggactcgcaataacttgcaacacaaggctatgagtgactgctgtttcttcaacgggtgtttagggcgctttgtataatattggtgcagggctttaaacgccggattgtgcacaaccagcgggcgaattgccagatacaaggctcttcgaagcctctttcttccccgtttggtgatggttgtttgccctttaaacttccctgaactatgttctttcaatgagagccctgctaaatttacaagctgttgggggtggctatactttgtaatgtcacccacctcagcgaaaaataaagcgactgtnnnnnnnnnnnnnnnnnnnnnnnnnnnnnnnnnnnnnnnnnnnnnnnnnnnnnnnnnnnnnnnnnnnnnnnnnnnnnnnnnnnnnnnnnnnnnnnnnnnngcgaaaaataaagcgactgtagtctttcccaggcctgggatagccatcatttgcctggctcccgggagaccttctaccaggctttccagttcttgatccaactgttggatttgttgattgtaaagctcatactgctcaagcaggcagtctatttcccgtttggcaaacttcatgccagcttgaatgccaatactctttctggctgcttccacaagctttgttgcctttttgttctgatggccctggattgccgttgtaaagtatttcatcgatgcgggtaccttcagccggcaaaaaggagacacctttcttcttccagccggcataacattgatgctaacattcgacacgaaatcggaatatcctatttaaattaagatagaaaaacaacaggcgataaaaaaactctccggccaacgcgcccggcgcagaccgggaaggggaaagcggagtgtgaaaaggctacccggctatgtgataaatgtattccaacaaacaaaggattcagctgtatcttgttttacaaattataaaacgctttcatcacaaacaacaaaagaaagagcaagatgacagctccgtaaaggatccctccgctgaatccaattctcattgtttttctccctaaaagggaatagaagccgaaaacctcacttctattcccacaattatcattcggacggcagcccaatgtttcatcttttcgtgcaaagaacttccgtctccatccgggtgattatacagtaccgctcctgtttgtttcctccactcccggtggtgtttgcagccgtttttgcacctggtcgctcagcagcttatacaatgttgcggcaaccggcacaccgaaaagcatgccaacgatcccgccaaggccgcccccgatgatgaccgccgccaggacccataaacccggcagcccgatcgacgaccctactacccgcggataaatgatgttgccttccacttgctgaagcacaacaatgaacaccaaaaagaacagcgccttcatcggatccaccgttaaaatcataaatgcgccgaatgccgcacccaaatacgcgccgacaaccggaatcaaggccgttgcactgataaatgccccgaccatggcagcatatggaaaatgtaaaagaaacatgcctgccgtacataagcagcctaaaatcacggcctctacacattgcccgacaataaagcttgaaaaagtccggtttgccaccttgagcacataatacaatctgtccgccgtctgctttttcaaaaaagcacggaccactttatccgcctgaatagccagcttctcctttgccgccaaaatatagatggcaaaaataatggcaatgaccaggttcattacgccgcttgttaaggcgccggcgatggaaaacgtcgaattcaaaatgccggtcaccactttggaaagagatgcggtcaatttttttgtgactgcatccagatcgacctgcaggctggagatgaactttccgagactggagtacttgccgctgtttgactggaaatagtccaagcttttcgtgtaaacgcgcggaatggcatcaatcaacactgtaaaagcctggatcaattgcggcacaatgatcaaaaccagaatggaaacaatgccgaaaatcaccacaaacgaaaaaagaatgctgacgcccctccgcgttgcgcggataaatttgttttgcgcgttcggaaaataaacgcgttccacttttttcattaaaatattgagcacataggcaatcgcagccccgagcacaagtgggaatgcaacatgccaaaccgccccgagcgcatccagaatcgtgctgaaatattttacaaaaagcacggccacaaccgccagcagtatgtatttgatccataaactaagttttattcctttcatttaatccctccgtctgatgcgtccgtttgtcttataatccatttaacttgattatacttgaaaataaaggattgcagcagaccaatttttatcattttttctgtgttatacatgatgaggcctgatcagatggttccagcacgtgaaattctcttgggtgggaaaatgaaaaatgaataaaacaggggatggcatatgttatttacgaaaaattactttaaaattggcgcttttctattgctgattgtattactgctttcaggctgctcaggaagacgggcaggagaagccaaaagtccgggccaggccaagtgctgccaaaggagagcaggttaagtgaccaggtttccccaaacagtgaactgccggtaaattttgtttgtatcccggggcctccggctgcgtcaaaactacccttctgaacgtgattgccggttttcaggcgccggattcagggaaagtgattattgttggaaacaggcatgctaaaacgagcccggatgttggcgccgtttcagcaaccaaatttatccctggctgtcaaatgaaaacaaacaggcgattttttccatccggcaattgcgaatggaaaaaccgatgctgaatgtgcgtgccttccagcataaaatgttcgccattggcacgctgatgattatgatcgtcttcagtattatcatgtcatccatgcttttgctgccgatgtactggcagagcggaaaactggtagctgtcgcgcttaccggcatccttcttttgccagggggaattgtaaacgggattgtgtcggctgtctcgggcaagctttatgatctatacggcgcaaaatggcttgtcagaatcgggtttctgatctgcatcgcagctggtgcaatgtttatctgtgtccaaacaacatcttcttttctttttgtgattgcagcgaatcttttgctcatggtcggcgcgccgcttgttatgtccccggcgcaaacgaacgggctgaacgcattgccgaaagagatgtcccctgacggcagcgcgattatgaataccgcccagcaagtgagcggcgcgattgccactgccttgtctgccacattgctggctgcaggcgaacacgcttatacaggggcaggcgggcaaagtgccgtagcggccttaacaaacggcgtccagtacggttttatgttcacgctcatcctggcagtcactggatttgccctttcctttaccgtccaaaccgttggtgtattggaaaagccgcaggaccagcaaaggaaaatgcagttgaaaaaagaaacggactccccctgttgaggagcagaaaacccgttttagcctgataagctaagacgggtttattaaggtttgctgattaaatccgatttgccggcaagctctgcctcaatattaccaaatcatggatctgcgaaagagcctgttttcgagtaaaacgtgaagttcgcccagagctgccagatcccctgccaggcaccggctgattcagcaagccctattgatttgctgctgtttttccgctttcacccgcattattatgaatcagaaaagaagttaaaaaggccaaaatgctgccgcaaaagccgaatagaaacaaatggtgaatgccctgcatataagtagacccgcttgtcagaaaggcacccattacggtcacgccgatcgccgttcccatgttccggcaaaacatgaaaaaggaagtagctatccctttttcgtaggcgctcaccatttgctgggaaccgataatcccgaccgtcgaaagcagcccgaatgcagcgccatggacaatcatgacgagaaagacgtaccagaacccatgacccggatttagaaagatccagcatacacccgaaacaagcaaaagcccgttcccgattaaaagcagccgccggtagccataccgcaatatccattttccggcagggactgcagcggccatccagccgatcgacgacccaagcagcgcaaccccgctcatgagcagtgacagccctgttactttctgcaaaaacagcggtacatagctagaagcaccaaacaacgccactgtcccgataaaggagttgacattcatccgggcaaatgtcttatttttaaacatcgaaagcggcacaatcggggaatcctgccttttttcataaaaataaaaaaggagaagaaaaaggattccggctgccgcaaacaaccagtagttgcggtgtacgaccgtgaccaaaagcaagagtgtgatcgcaaccgcaaataatgcagctcctatgtaatcgacacgcgcttttttcggcgcgtaatgctcgttatacggcaaaagcgttaaaaacgaaatgaggcagactggcaggttgacaaagaaaatccacctccacgttaaatacgttacaaaaaacgagcctaaaagcggcgccaggacagcggataatccccacatgccagtaaacaatgcctggatttttccgcggttttcaacagaaaacaggtctcctgcgataatggccggaaacgggaccataaaacctgccccaatgccctgaatagcccgaaagacaatcagttcaatcatcccggatgacatgccgcataaaagcgacccggcgaaaaaaagcacgatcccggacccgaacacttttttcctcccgaacaagtcggacaaccggcccgcaatcggggataaaatggtgctcgtgatcatataggaagcaaatgcccatgcgtacaagtcaaagtggccgagttcttttgcaatgacaggcattgtggtgttcataatcgttgcgtcaatcgatgacacaagcattgccaggacaatactgaccatgacaaacgttctgctcttcataaaatccctccattcccttttaacattccggtttccgtcacgatttgccggaccggaatatcataagattcgctggggacatgctccttcaattggtacgagtggaccaaagacacggtctgattgggaaaaccggcaagaaaccggtcataataaccgccgccaaaaccgatgcgaaaaccttttttgtcaaaaacaaggccaggaacgatgagcaggtctatcgcctgcttctcgatttttgctgtttcttccggtttcggctcgagcaggttaaaaaagcttttttccaattgcgcgaaatcatccagcctgtaaaaaacgagctctttttcttttggcacgcattttggaacacaaatcgttttcccctgcgcccacccggtttcaatgatccgcttcgtatcccattcgaaatgttgggagaccgtcacgccaaccgttccggcatttttccacaaaccggaggaaaataaaatttgttgcagtttttcttctatggcctgcttttcgctaaaatccagccgctttaaccagccgatcatttctcttcgtatttccgccttgtccattttcttcaccccggaacacccatcaaaatttgcgcttttccatcttaccatgtttgggctgaagtggaaacgaaaatgccccccgggtgtatgagaccagaggggattttctgattcgctcccttgggaatggcaagtacttttttcactttttagaattccccggttatccacgccaaagtgattcgagattattgttgaattccactttcaacgggtgcaagaggcagcttttccgggataccggagctcctgaaccccgctggcaatgacagttgcttagcatcctttgctgcaacagaaaaagcccccaagctgcatacggcatgggggctttttcttatctttttcctgcatttagttgtgccatttctccgagatagcgcccgctttcctttatcatccgttcctgcgttttttggtttacggcaatcaggccgaatttcatagaatagccggattgccattgtgatcaaatgttgactagttgcagcaaactgatgcctgacttctccccttttttcaccacccggactgcagggaaacattaatggccccgttctatttcccgctggattttttgatttcttcaagcggataatcgagcatatctgcgatcgtttcgggtgcggtgcctttgctcagcatttttttgattgctatttgtaccccttcttcgattcctttttgcctgccttcttcaatccctttttgtatcccttctttgagcccttcctctctttccccgcggatattcgccagctggtcgcgcaaaaatttcagccgggcttcgtacaatactttgttttcccgaatggtacttaaattttcccactctttgattgcgtcaagcacttcctgctcgttcatcgcccatttctccggttcggggaaacctctttcggtgccggcaggttttttcgatttgaccctgcccttagaacggcccgctcgtcattctgccgcccgcattttcgtagtattcgcggcggttccgttcaatgtatttgctgaaccgctttcctgctattcccggatagccccctttcactctatctaggaacgcatcaggggctaacatccatttatcccagcctgtgcctggcattccaatccaatgacgggggaaccaaaaggattcccaaaatgcggaaatcctaattttccttcaccggaagctggcatgaaatatggcggaaattcttattcccccttgttcttcttctccttttcatgcacaatcatgcgccagtttaaatcgccgcgcattaagccttggacgagcagttcagctgtacccatgttggtggcaagcggaatcgaatagacatcgcaaagacggagtaaagcggtaatgtccggttcgtgcggctgggccgtgagcggatcacggaaaaagaaaacgagatccatttcatttttggcaatcattgcgccgatttcctggtcgccgccgagcgggccggaattgaagcgggtaattttcaaattggttttttccataatcctcttgccggttgtgccggtcgagtacaattcatggccgtcgaataccggctcataggcaaccgcaaagtttacaatttcctctttctttttatcatgggcaataaaagcaattttcaactggaaaactcccttctccaaaaaataacgttactactataatacgataatattataaaaagcggatgggtaaatgtcattgcgagcaaatgggtcgcatggttgtgcataacaatccggttttccggatcaacctcaagccttgcgatatggctcataaaatgggacggaagctcgcttgtcggcattgcggataccccctatttcaaccggctgttcaaacggaaaacggagatgacgccgcttgcttacaggcggaacgggtgacggatccctgctgtttgcgttgtcgtaatactggttggattgcacaatgtcagcggacggggattcattttaattgcgctatcgacaagtgttcctttttgcagtttgaatggcacaacgctggtgggatgggatttcccttgctgtttgcgctgtataacggatggtgcctaaacgcagagccccctcccgcccttacattcatgcaggccggacgtggaacattctaatggcattcaagtgaaacagggagaagtttgtggcccgctccatttttccatcgcaatggccgggcctgaggaacggcaagaaaatgctattagacgcccatgccgcaatgaatgcggcaccagcagaagagtgaaagtcagccggcgcatattttcaggatagaaaatgctattcttccacttctttaatcaccatgtttggcagttccctgatcgcatcacggattcgttttgctcggattttcccctggccggcaaagcggagcaggttgtaagcatatatgccaaaatgcagggcaagcgcattcgtttttttattccgggaaggcggctgtttaaaaccaagatcaaacataaattcccgtctcagtgatttacaggctttcaggtgttcgccgtaaagccttggcacagcttccggcggggtatcgagcgttgtcatgtacacatctgcttcatactctggaatcagaaggatttgcccgtttttatcaatagttgtttcaatgagtttaaaaacatagtaggctggtttttttgccccggctgccgtaatgggttccgcaacagacccaaagtaaacgttttttccttcccgttcggttgagcatgtgccgtatttccgtgcagtttccatccaggtgccggcatctgtctgcagtttgatcacaaaatcaatgttacggtccaacaatttttccatcatttcggatccttcttttgcctcgagccgccaaaggaaaggcccttccgccaattgttcagcagcacggaccgtcacgctcgtttcttgtccaaaggaaaggcagtacccttcctttccaataaaaacaaacggcgttgaaacatctaccgggataaaacttttgccttgtatggtcaccgggttgataggtgcaccagccttgcgaagcaggtgaagagattcatcaaggatgatctgtttccattcttctgataaagctgcttcatccaggcggtgctcaaggacagccggcgagggaactctttccaattttaaaaaggtacggaaatcacaatcactccgcaacggttcaatttcagcaaacttatttttcccaaggcaaagcagcccgatataagacttcgcgatgtccccgtttgaatagccgggattccttttaatcgtttctgacttggcactgttcagccttgatgcgagatgcgtctggctgataagaaattctacgatgcccattccgaattgatcgcttattctttcacttgtttgctcaatccgtaaatttttcatctgctcacctacgaaaattgatatttatattatacaaaaagttgcttataatgggtatgaagtctgaattttagaaaggatgtgaacgatgcttttcaaggaaaggaaaacttcacttgagtatgctcttttaaagtcgctgagcagccggatgaaactccatgaaaaagaccttcagtatctacggaatttggaaaaaggtgacgaaggcgagcggtattttgactctttaacaggagcgcttacatgtgattgttttgtactgaatgatttgcgcctttcctgcaacaatgctacgttccagattgatgccctcatgattaccggcgaaaccatttacctgtttgaagtgaaaaattataaaggggatttttattacgagcgggacaggatttttacaaaaaataataagtctgaaatcaacaacccactgcttcaggtcaaacgttgcgaatcgcttttccggcagctgattctctcgctcggtttcaatatgccggtctcggcttccgttgtttttgtaaaccccgaatttaccctgtaccaggcacccctaagtgcgccatttatttttccgaatcagttaaaacggtatatgaaagatttgaatgcaatttctgcaaagctgagcggaaagcatagaaggctggcagaaaagctatcttcgctgcatatagaagaatcgccttttcttcatttgccgaaatataggtatgatcaattgcggaaaggcattttttgcgccacttgtggttctttttcctgtgcggtaaaaggacgctcagttatttgtgaggattgtggacaggctgaatctgttgaggccgcggtcctccgcagtgtcagagaatttcggatgctgtttccagagcggaagattacaacaaatgatatttttgactggtgcaggattgtggactcgaaaaaaagggtgagcaggatactggcaaaaaattttaataagttcagaggtggaaggtggtcttactatgagtaattgatgatcacaaacttatgaattacaaattctaccggggggaaaagcatttggtattttaacacttcaaaaagaccaaatatgctctgttcccccgttatttttgtccttttgaacactccaaaaggacactttgttccggtcaatggctccttttgtccttttgaatgctccaaaaggacgattgctccggtctacgggctccttttgtctttttgaatgctctaaaaggacaatttgctccggtccacgagttcttttgtccttttgaatactccaaaaagacattttgctccggttcatggctccttttgtccttttgaatgctccaaaagaacaatttgctccggttcacgagttcttttgtccttttgaatactccaaaaggacattttgctccggtttacggctccttttgtccttttgaatgctccaaaaggacaattgctccagtcccgtgactccatttgtccttttaaatgcctctctgaaacaacagtaagcttacttttgccatattttaatagcaaaccaaagtatcttgttcagccctttttggatttcccccatttttccggtgcccgtcgccattcctcgagtgtcgccaagtcttcttcccggatcagccctttttccacgccaactttaagcagcgtggagtaattcgataaagcgtaagcgatgatgccttctttcgcaaaatttgcagccccggccggaagttcatacgtaaaaatcgagacaacgccgagcacttcgcagccggcttcccgcaatgcgcggacaacggtgagcacgctgccgccggttgaaattaaatcttcgacaacgacaactttttgcccggctgcaatccgcccttcgatctggttgcccttgccgtgtgtttttgcacttgaacggacgtataccattggcaggttcatcaggtcgctgacaaaagcggcgtgggcaatcccggcagttgccgtgcctgccaccacttccgtttccgggaagtgtgcttcgatcagctttttcagcccgatggcgatttctttccgcaggttcgggattgataaggtaatgcgattatcgcagtaaatcggcgatttgattccggatgaccatgtaaaaggttcaccgggttttagaaaaacagcttcaatgtcaagcaattgtccggcaatgtatttttccattattcgttcccccattgttgtttcacttttacataagcttcgtacgggtcgggcgctttcgtaatcgaacgcccgacgacaattgcggtcgaaccgagttccctcgctttcgccggtgtaacgacgcgtttctggtcggaagcatcatccccggccagccggatgcccggcaccactttcaaaaacgccccgccgagccgcgccgtaatatcagggacttcaaaagcggagcagacaacgccgtcaagccccgcatcataagcaagcacagcgtaatccagcactgattcgcgcagcggttttaaaatgccttgttctttttgcatttgcgtttccgaagtacttgtcagctgtgttaccgcgacaatcgccgggcgctttttccatgcaggggtgccggcttccaaaccatccaaagcggctttcatcatgtccgaaccgccggcggcatggacgttcaccatatccgctccaagccgggctagccctttcattgcccgcctcactgtattcggaatgtcatgcagctttaaatcaagaaaaatgtcatgccccatttccttcagggcagcaatcaaacaagggccggcctggtaaaacaattccattcctaccttgacatagagcggctcgctgccaaactgctgtaaaaaaacgagcgcttcttcttccgacgagaaatcaagggcgatgatcggtttatgcatgctgcttgtggctccttccaatcaggtcttgaatgcttccggcgccgagctgttccatcaccgccggcagttcgcggatgatgcgcgggcaggcaagcgggtcaataaaattcgcggtgccgattgcgactgcactagcgccggcgtataaaaattccactgcatcttccgccgtcatgatgccgcccatgccgataatcgggatatccacttcccggctcacctcgtaaaccatccggacggcaaccggtttgacggccggcccggaaagcccccctgtttcattggcgagaaccgggcgcgccgttttcaaatcgattttcatgccgaggagtgtgttgatcatcgtgagcccgtcggcaccgccggatgctgctgccttggcaatcgccacaatatcagtgacattcggggaaagtttcacatacaccggcacttccgagacagcttttacttgccgtgtcagttcaaacgccatctccggatcggtgccgaacgcgatgccgccggatttcacgttcggacaggaaatgttgagttcaagcgcgtgcacattcggcgcttttgaaagatggtctgaaacgtagacataatcttcaaaagtggagccggcaacatttgcaatgaccgggacatcatatgcctgtaaaaacgggagctcttccgcaagcacacttgccagccccggattttgcaggccgattgcattcagcatgccggattctgtttccgcaatccgcgggaccgggttgccgaagcgcggttcccttgttgtcgctttaatcatgattgcgcccagttcgctcaaatcataccaacggctgtactcacgcccgaaaccgaagcagcccgatgccggcatgaccggatttttcaaggacaagcccggcagttcgacgcgcaaatccgggagaacacggcgctttatgccccgtctttcgggatggtgttcaggtaattcggtcatattatgatctcccccatttcaaatacaggtccgtcgctgcatacttttttcgaagcggtgccggccgggtcatttttcgggcggcaaacgcacccgtagcaagcaccggttccgcatgccatccgttcttcaagcgagaaaaagccgtgccgcgccgggtatgccgcttccaatgcgcgcagcatcgcagccgggccgcatgcgtacaaacagtcaaacgcccaattctccgctgccagtacatccgttacaaaccctttcgtcccccatgaaccatccactgttgcgacagatgtcggggcaagcgctgaaaacttctccacgtaaaaagcgtgggctgccgattcaaatccgagcacgtggcggacttcaacgccgcctgctttaagttgccgggacagctcgtacagcggcggggccccgatgccgccgccgacaaggagcgctttttgcccggggcgaagcgcgtccaccgggaacccgttgccaagggggccgagcacatcgagccgtgcgccgggtgtgatttcggccatcaggcgcgttccttttccctgtacccggtacaacaaggtgagcgcgccgtttttgcggtccaccgccgcgatgctgatcgggcggcgcaggagcgggtcaaacccgcttcccgctttgacatgaacaaactggccggggcgggcgatttgccggaccaaactgccggcaagcaccatttcccaaatatcctgtgcaatcagccggttgcttttcacggtcatatattcctggatcatgcgtgcaccgcctgctttgccccctgcaccatcggcataatcgaaaaactcatcgattccaaaatggacaagatggccgctgccgtatcaagcgaagtcaggcacgggatgccgcattcgaccgcttccctgcggatccggaacccgtcacgttcgtattgccggccttttgtgatcgtgttcaggacaaattgcacatcgcccctccggatcgagtcgagcacggtctccccgtcgccgccgatttttgctacttcttcgacagccaggccgttttcccttaaaaattttgccgtccccgccgttgcttttaaagtaaaaccgacctcgacaaagcgctttgcaagcggcagggcttccggtttgtctttatcggcaaccgtaaacaggatgctgccatccggcgaaagcttcatgcctgctgcaacgagtcctttgtacagcgctttttcaaatgtacggtcgcaacccatcacttctcccgtcgatttcatttccgggccgagtgtcggttccacccgcttcaattttgcaaaagagaaaaccggcactttcacgaacacttccgctttttccggcccaaggccagtgccatagccgaggttttcaagcgattcgcccaaaatcactttcatcgcaagttttgccatcgggacatcggtaattttgcttaaaaacggaaccgtccggcttgagcgcgggttcacttcgataacaaagagttcattgtgcgagacgataaactggatgttcatcaaccctttgatttcaagctctgaagcaagcttgcggcacgtctccgccatttccgcttttaatgcatcggaaagccgctgcggcggatagactgcgatcgagtcgccggagtgtacgccggcccgttcaatatgctcgacgatgcccgggattaaaatgtcctggccgtccgcgatcacatcgacttcaaactcctgccctgtcacataacggtcaatcaaaacgggctggttcgggctgactttcaccgcatgtttcatatactggcgcaagtcttcttcatggtagacgatttccatcgcccgtccgccgagcacaaacgacgggcgcacgagcaccggatagccgatttcagccgcaattcggacggcttcttccgccgaagtgccggtttttccgagcgggcgtttgatgccaagccggtttaacaaatggtcgaacttgtcgcggtcttcggcacgctcaagattttcaagcgaagtgccaagaatgcgcacgccgcgtgttgcgagctgttccgcgagattgatcgccgtctggccgccgaactggacaacaaccccttccggctgttccaaatcgatgatatgcatgacatcttcaatcgtcagcggttcaaaatagagcttgtccgagatgctgaagtcggtagagacggtttccgggttgttgttaatgatgatcgcttcgtacccggcttcttggattgcccaaaccgcatggacagttgcatagtcaaactcgattccctggccgatccggatcgggccggagccgaggacaatgatgctttttctgtttgtcacaaccgattcgttttcttcttcatatgtgccgtaaaaatacggcgtttctgatgcgaattcgccggcacatgtatcgaccattttatagaccggcaaaatgccgttttctttgcgccatgcgtacacgttttcttctgccgctttccacagcctggcaatcatcttatcggcaaagcccatttcttttgctttccgggccgcctctttgtcccatcgcgcctcccgcagcgtgttttcaaagcggatgatgttttccagcttatgaaggaaaaacaagtcgattttgctccagtcatgcagctgcccgaccgtgacaccctttcttagcgcttctgcgatgtaaaaaaggcgttcgtcgccggcatttttgatccgtttttccatcacgtccataccggatgcttccccgagttccaaatgatggacgccgatttcaagcgaccgtaccgcttttaacaacgattcttcaaaagtgcggccgatcgccatcacttcgcccgttgctttcatttgcgtgccgagcctgcggtatgcctgttcaaacttatcgaacgggaaacgcggaatttttgtgacgacataatcaagcgccggttcaaaattggcgtaagaagtgccggtgaccgggtttttcatctcggccagcgtgagcccgactgcaatttttgctgacagtttcgcaatcgggtatccggttgctttcgaagcgagcgcggatgaacggctgacgcgcggattgacttcgattacataatattgaaaactgtccgggtcaagcgcgagctgcacattgcagccgccttcgatgccgagggcgcggatgattttcaatgatacattgcgcagcatctgatactctttgtcgcttaacgtctggctcggggcgacgacaatcgaatcgccggtgtggacgccgaccgggtcaatgttttccatgttgcagacgacgatggcatggtcttcgctgtcgcgcatcacttcgtattcgatttctttaaaaccggcaatgcttttttcaagcaggcactggtggacggggctctggcgcaatccgcctgacacggtttcgatcagctcttcttcgttacagcagatgccgccgcccgttccgcccagcgtgtaagctggccggacgatgaccgggtagcccgttttttcgataaaccggtaagcttcttcaagtgtatggatgatcatgctgtccggtaccggttcgccaagttttcccatcagttcgcggaacgcttcccggtcttccgcctgctcaatggcgccaagccttgttccgagcacttcgacgccgtactcgtcaaggatgccggatttcgccagttccattgcaatgttgagaccggtttggccgccaagcgtcggcaggagggcatccgggcgttctttgcggatgatgcgggcgacaaatgccggcgtgagcggttcgatatagattttatccgccatttccgtatcggtcataatcgttgccggattggaattgaccaaaacgacatgatacccttcttcttttaaagcaaggcaggcctgcgtgccagcgtaatcaaattcagcagcctggccgatcacgatcgggccggatccgatcacaagaattttttcgatatcagtgcgttttggcataggtttgttcctccttttgtttttcaaccatggttaaaaatttgtcgaataacgggttcgaatcgtgcgggcccggcgatgcttccggatggtactggacagtaaaagcagggtatttgcgatgtgccagcccttcaatcgtgccgtcgttcaacgcccgttccgttacgataaggcctgttccggcaagcgacttttcatcgactgcatagccgtggttttgcgaggtgataaccgttttccccgtttggatgtcctggacaggatggttcgcgccgcggtggccgaattttagtttgaatgtatcggcgccgcacgccaacgcaaacagctggtgcccgaggcagatcccgaaaagcggcactttcccgagcaatccttttaccatgtcaaccgcgcaggcgacatctttcgggttgccggggccgtttgacaacatcaccccgtccggccggagctgtaaaatgtccgccgctgttgtatcgtacggcagcacggtaacgcggcagttccgttttgaaagttcggttaaaatgctttttttcgcgccgaaatcgacaagggcaatatgtttgccgggcccttccatttcgtaacgcttctttgtggatactcttgcaacggcatcatgaacggcacgtttggcttgaaggtgtttgacaacagctgccgggtcttcgttttcggcacacagggcggccctgagcgtaccgaaagcgcggatttgtcttgtcagtttgcgggtatcaatgccggatatgccgggaatatctttttcttttaaaaagggatcgagcgttaaagtgctccgccagtttgacgggtacgaagccgcttctttcaccacaacccctttcacatacggcttagctgcttcaaaatcgttccaattgatgccgtagttcccgatgagcgggtaggtgaaagtgacgatctggccgtaaaaagacgggtctgttaatgtctcctggtagccggtcatcccggttgtaaaaacgatttccccataagcctcttttgcactgccaaaaccttcccctctaaaaacggtgccgtcttccaagatcagttgccttttcatttcaatgccagctccttttcccataccagttttccgctcccccatgtggcttgcgggaagcctttgcacacgcgcccctgaaacggggtattttttcctttcgataaaaaacggtccgggtcaattgttttttctgccgccaggtccactgccgtgatatcggcgggcgccccggttttcatcgtcccgtatggaagcccgaacgcaccagccggcttttttgtcatccagtcaacaagctgttttagcgtaaatatgccggtttcaacaaaatgtgtatataaaagcggaaaagctgtttcaaatccggtgatgccaaatggcgcccgttcaatgcctttttctttttcctctgcggtatgcggggcgtggtcagtggcgataaaatcaatcgtgccgtccaaaaggccttcaataagggcatcgcggtctcttttcgaccggagcggcgggttcattttccagttggcatcagggcccgggatgtcgtcttcagaaaggagcaaatggtgcggtgtcacttccgctgtcaccggaatgccggcccgttttgcgtcacggacaacccggacggattctttcgtgctgatatggcagacatggtaatggcagcctgtatgttctgcaagcagcacgtcgcgggcgatctgcaccgactcgcatacggaagggatcccttttaacccgtgcgccgccgcaaaagatccggcatgcacgcacccgccccggataagcgaattgtcttcacaatgggcaacgaccgccatgccgagtgcttttgcccgctccatcgcagccagcatctgccccgcttcctgcacgccgacgccgtcatccgtgaacgcgaaggcgcctgctgcttttaagccggcaaaatccacgagttcgccgcctttttcatcaagggtaattgcagcataaggaagcacgcgcacaaccgcatcccggctgattttttcctgcagggataaaaggcgcgccggccggtcggtaaccggtttggtgtttggcatcgcagctatcgttgtaaacccgccttttgccgcggccattgtcccggtgcggatcgtttctttctgttcaaaccccggttcccgcaaatgcacatgcaagtcgacaaacccggggagaaccgtgagcccggttgcatcatatacctgctcgcccgcttctttcagttccgggccggtttccgcgatttttccatctttgatccggatatcccgctttgccggttttcccttttcatctaaaaccattccgcctttaatcaaccagtccacttggcaaaccaccttttcttttttgttaaaatcccgctccatagcaaccttcatttttcaagctgtctggaaaaccgctttttctttctgtaaaatcgtttttaaaatcgccatccgggcaaacacgccgttttccatttgtttgaaaatccgcgaccggctgcactccacaaggctgcttgcaatctcgacatcgcggttgaccggccccgggtgcataataatgctgcccggtttcatcatccgttcccgttccaccgtcaggccgaatgcacggtggtacgattcttttgtcagatggccggtttctttatggcgttcatgctggatgcggagcagcatgacgacatccgcctccgctacgccgtcatcgaccgggacgtaccggagatgcatggtcgggtcaaaccattctgtaggccccgaacaagtgacggtggcaccgagctttttcaatgcttcggcgtttgatctggcaacacggctgtggacgatatcgccgatgatacacacctttaaaccgcgaaagccgccgaattcctgtttgatcgtcagcagatcgaggaggctctgggacggatgctggccgctgccgtctcccgcattgacaatcgaaagcgccacatttccggcgaactgcttgtaatattcatcttcctggtggcggatcacaacaagtttgacgccgatcgactgcaatgttttcacggtgtcgtacaatgtctcacccttttgcacgcttgaagccccgacttcaaacggaagcagctcaaggccaatccgccgttctgccacttcaaagctgcattttgtccgcgtgctcggctcgtaaaacaaattggctgcaaaaaccggctccggtgctttccatacggccccttttgaaaaggcatcggcttcatccagaagttccaaaatttcctcattgcccaaatcggatatcgtcagaaaatgctgcattttccatcctcctttgtttttaacccaaaaaagcaccctgctgatggcagggtgcgtgaaatggcacggcaagtcaaaagccttgcgcggccggcacccttccaagcctctccggacttgcagttaaaaggtgttccgtattcatttcaatggaaaagcccctttgcctcaagggtgcaaaggggctttcaaaactcctttgcaaacctcacagggcttgcttaaaaggattacacatcatggattgtgaccaggtcccgcccgtccacatccgtcaattgtacaacgattctttccgactggctcgtcgggatatttttcccgataaaatcggggcggatcggcaattcccggtggccgcggtcaacgagcaccgcgagctggatccggctcgggcggccgatatccatcagcgcgtccatcgccgcgcgcactgtcctgcctgtatagagcacatcatcgacaagcacgatctttttaccggtgatgctggatggcaggttcgcgcccttcacttccggttcgccgtctgccatttttttcgataaatcatcgcggtacagcgtgatgtccagctcgccgacttcgactttgcgcccttcgattctctcaatcctttccgccaggcgatcagcgagataaatgccgcgcgttttaatcccgatgagcatcgtgtcttcaatgcctttattccgttcaatgatttcgtgggcgatccgcgtcaacgccctgcggatcatgatttcatccattactaccgctttttgggccatggtgtctcctcccgggaaaaatcaaagccttccgcaccgaaggcaggaaggctttgtaaaatgaacgttcccttgccagcctcacgggactgtttttaaaaggcttatgaagttatttttaccttacccgtttttcatccgtttgtcaatattttttataccgtgatgttcacaaaccgcgcctcattgtgtttaaaagatgcgcgaaatcatccggcagcggcgcttcaaatgtgagcgtttcgccggtgcgcgggtggcaaaaaccgagtaccccggcgtggagcgcctggccgccgaaatcaatcgtttttttcggcccgtatttcgggtcgcctgctaaaggatggccgatatacttcatatggacgcgaatctggtgggtgcgccccgtttcaagccggcattcgataaatgtataccggtcaaaccgttccagcacgtggaaatgggtcaccgcgtcttttccgttatcgaccacggccatccgctggcggtcagccgggtcccttccgatcggggcgtcaatggtgccggcttcatgcggaatattgccgtggacaagcgcaaaatatttgcgggtcaccgttttttcactgagctgtgccgccagcttttcgtgcgcgtaatcatttttggccaccattaacagcccggatgtgtccttgtcgatccggtggacaatcccggggcggagcacgccgttaatgcccgatagatctttgcagtggtacatcaggccgtttacaagcgtccctgtaaaatgcccgtttgacggatggacaaccatgccttttggtttattaacgacaagcacatcggcatcttcataatatatatcaagatgcaagtcttccggttcaatatccggcaattccggctccggcacctcaatttcaaccaggtcccctgcctggcatctgtaatttgctttttcttttttgccgtttacggtaatatcgccatctttaatccattgctggacttgtgatctcgaccattcttcccggatggatgagacaattttatcaagccgttcatttgcttcgtgttcaagaatggtgtgatccattttttccatcggttttctcctttgtctttctgtcttccaaaagcattgaaatcagcaacagtacaacgccaatcgttaaactggcgtccgccacgttaaaaatggcaaaatcgtagctgccgaaacgcaaatggacaaaatcaacaacttcgccgcggaacaggcggtcaataaagttgccgattgccccccctaatatgaggccgaggctcgtgccaagcagcgccctgttttttgcgtatttttgtatgtaataaagaatgccggcaatgacaaccagggtgatgagataaaacagccacatctgcccttccagtatgctgaaggcagcgcctgtgttgcgcgtcgatgtgagaaaaaagaaacccggaatcacttcaatgctttccccgagcgccatcccttttaaaacgagccattttgccagctggtccaggatgaccacaatgagtgcaaccgcataataaaaaataaccaatcgcttttcctccgcctgtgtttacggcaggcgcaaaatgccgcctggcccggaatatatttcttcctgcattttagcataaacaacaggcagtgaaaagaacggacggccggatcccggtccgcccgtccctgcctgctttttcaggcggattcttgctgattgaagttgcgcaaaagcaatgcccttttctagtgaataagatcatacgggacggttactttgccgtatgacaggatggtttgccggtccgcaggcaacagggaagggatttccgcaaggcccggggcaactttccgggtgccgtggaacccgtccaatgccgcctcaatctctttcagttcctcctgaaccagatgttgcacaagctcatgtttcgcctcgtacacggataattcagcccgtagcgattgcagccaaattttcggatctttacgcatcttccaacagcctccccgcttctttgttggttttagcattcccgcaggcaaggcttgtttgcggaaaaacgttttctaaaagtaacaaaatcatgcagcggcaaacggtttttgccagttaaaatccggcgctggcaatgggctgaaatccgttaaaaaagccggcgctgcatgtcttcatgcaagccccggcttaaagcttcacacttcccgcatcaatgttttcacaacttgtgcacagcgcgggcagagcgtcggatggtcatggtccaggccgacttccggcgttacaacccagcaccgttcgcatgtttcgccttccgctttttcgacgacaatagccgcgtgttcaagcttcagcgcattttccggcgcgtcttcaatggcgcctgccacttcaaatcccgatacaatgaacaattgctttttgctttccgaaatgctgtcaagcagtgctttcgtctcctcattcacatacaaggttacttttgccgtcagcgatttcccgattacttttgcatttcgcgcttcttccaatgcttttaaaacgtctccccggagcgccataaacgcattccatttttcttcaagcgcactagcatccggcaaatccacatattccggcatatcggtcagctggacgctttcttccgtcacacccggaatatactgccagacttcatcagctgtatgcggcaaaatcggcgacaatagcttggttaaggcaacaaggcattcatacaaaacggtttgcatcgcacggcgttccggattgtctgcaagttcgatgtacagcacgtcttttgcaaaatccatatagaacgaactgaggtctgtggcgcagaaattgttcaccgcatggtaaatcgtggcaaactcgtaccgttcataagcttcccgcacttcttttacaagcttgttcaatttgacaagcataaaccggtcgacctcgcgcaaatcttcataggcaacttggtgccgggccgggtcgaagtcgttcagattgcccagcataaaccggaacgtattgcggattttccggtagacttcggacacttgttttaaaatttcattggaaacccggacatccgcctgatagtcaacggaagcgacccacaagcggatgatgtcagcccccagctgttcaaccactttgccaggcaaaatcgtattgccgagcgatttgctcatcttccggccttcgccgtccagcacaaacccgtggcttaaaacgccgtcgtacggggcgcgccctgttaccgccacactggtaatgagcgacgagttaaaccagccgcggtactggtcggaaccttcaaggtacaaatcagccggccgtttcaagccttcttgtgcagccagcacgccctgatgggaagaaccggaatcgaaccagacgtccataatatccgtttcttttttaaatacgccgttcgggctgcccgggtgcgtaaagccttccggaagcaggtctttcgcttcccgttcaaaccagacgtttgatccgtgtttgcggaacaggtcggacacatgccggatggtttcttccgtgatgatcgcttcgccgttttccgcgtaaaaaacagggatcggcacgccccatgcacgctggcgggagatgcaccagtcgccgcggtcgcggatcatgttatgcatccggagttcgccccaaacaggcgtccatttgacatcttcaacagctttcagaatgtcatcgcggaacatgtcaatcgatgcgaaccattgcgatgttgcccggaaaattaccggttttttcgtccgccagtcatgcgggtacgagtgcgttaaaaacttcagtttcaaaagcgcacctgcctgatccagtgcttcgcagatcggtttgttggctttgtcgtaaaacagcccttcaaaaccgggcgcgtcttttgtcatcatgcctttgtcatctaccgcgcaaagcacatcaagcccgtattttttgccgatgagaaagtcatcttccccgtgtccgggcgaggtgtggacgcagccggtcccgctgtcggttgtaacgtggtcgccgagcatgacgagcgaatcgcggccgtacagcggatgttttgcgacaatgtactccagctttttccccggaactgtttgaacgacttccgcgttttcccattccaaaacgctgcttacttcttcaagcagggcttcggcaaccagatatttgttgccgcccgtttttacgaccacatagttgatctccggattgacggcaatgccgaggtttgacggaatggtccaaggggtcgtcgtccagatgacgatttttgtgtccgtgtcaagcacgccttttccgtcttttacgtcgaacgcaacataaatcgatggcgatttgatgtctttgtactcaatttctgcatctgcaagcgcggattcgctggaaggggaccagtataccggcttcaggcctttgtaaatatagccttttttcgccatttccccgaatactttgatttgctcggcttcatatgcgggccggagcgttaaatacggattttcccagtcgccgcgcacgccgagccgtttaaacgctgtccgctggcgatcgatttgctcatgggcatatttttcgcacagtttcctgaattcggcaaccgacattgatttccggtctacgcctttttttgtcagttcctgctcaataggcagcccgtgcgtatcccagcccggtacataaggggcatggtaacccgtcatcgatttaaaccggttgatgatgtctttcaatgttttattcagggcgtggcccatatggagatcgccgtttgcatacggaggcccgtcgtggagcacaaacagcggccttccttccgtgcgtttcatcaccttttgataaatatccatttcttcccattttgcctggattttcggttcttttttcggcaaatttccacgcatcggaaaatccgttttcggcattaaaagtgtatctttgtaatccatgctgatcctcctgccttttgcatattgtattttgaattttttgttatgttcagccttgccaaaaatccaataaaaaaaccttcccatccccaaaatagggacgagaaggttcccgcggtaccaccctagtaggcatccaatatgcccgctcgacatccgtaacgtggaaggtcccgcttaactctactggccttttcggcgttaaaggcaagaactcaagggggatgttcaggctgcgcgctttgccgggctcgcactgtccccggttcgcttggaaagctttcacaaccctactgccctgtcatcgttttttcgtatacagtattgaatgtattccattatagtggaccgtgttcggattcgtcaagtttgatttgcttcttcttcttccagttcaaactccgtagcatcgacttcaaattccatcagcttttcccagtcatcgctatcaatcaggtcaagctgcgcctcaatcagcattttaaagcgcgtccggaagactttcgactgttttttcagctcttcgatttcgagcgcaattttccttgctttcgaaagggcttcattgacaatccggtcggcatttttttccgcctcgcggatgatcagcttcgcttctttctgggcattgccctttacttcttccgccgcttcctgggcaacaacaatcgatttatttaaagtttcctcaatggaagtaaaatggctcagccgttcgtttagcgacgccactttatcttccaggtttttcttttcgcggatcagcatttcataatcttttatcagctggtcaaggaattcatttacttcatcttcatcatagccgcgaaaccctttgctgaactccttattatgtatatctaaaggcgttaaaggcatgtggccacctcctgttcaatttgactctcgattgcaagattccccttctttttatattataatggaattcgacgattttttgggaaaatcctgctaatcaatcaaattattttaaaatccctgccaccattcgccatttttctttcttcgttttgccttccacccggatgagccggcttctcccgtatcccctggttgaaaaagtatcgccttccccgcactggaatgacgggtcttccactgttttccagttcactttcacaagcccgtgctcaatcagcatccgcgttttctgccttgaaatgttataaacggcggacaaaatcgcgtcaaggcggagcgaactgacggtggcctgtttttcaagccagtgttgttgctgccggatggcctgatccaactgcattttcgtaagggtgaccggcgtttttccgatctgccggaattccatttgaataaagtccgcaagttcggccgcagcgaaaaactgaatgcgcccttccccgattaaaatatccccgaatttttcgcgtttcaggccgagcgccatcagcgaaccaagcacatgtttatgttcaaaggaaacaaatttggcagggtaatgtacttcgaataaggcaagatggaagtcgtcctcatccggagaaaaatagtcaggaaaaagcagtattcttttccgctcgctctctttgtatccgccaaaagcccggacagagaccgcgccgtgatttccggtcaccgtgttgacaatctgctgcatccgcggatccaaaaaatccgtcagttctggggcatacgcatcttccacgtattgtttccaggccagcacctggtcaataaattccttttcatccggccggaaatgctggtaaatcgaatccatttgtctttgctccttttaaaaaaaggaactgcacagtccctttttctgaaaatggcttttttacatgaaccaagaaaaaatttgcgcaatgccggctcttgccaaatccaggacaaaaaaagcgacgatcggagaaatatcaatcatgccgatcggcggaatgattctgcggaaagggtcaagataaggttccgaaacgcgcgcaaacaaacgcccgatgtcggtgtccctgagattaaaccacgacataaagatataaatcaggagaatgtaagagtaaattctcatgagaagcagaatgatgtttaaaattgagactagaattggatccatccggtttatggccacctcgtatcgtcatattcctgcccctgcaggaattcagaaatttttccggaaacttccacgttatccggcgtacaaagaaaaatattgctgccgactctctggatatcgcctgcaatggcgtacaccgtcccgctcagaaaatcgacaatccgcttcgcctggtcatgcggcatgctttgcaaattgacgaccaccgcgcgccggtttttcaaatggtcggcaatttcctgtgcatcggcataaacccgcggttccaccagaatgacttttgaagacttttggacgctttgcaggctgaccacattttgccgcgcatgccggaccggtttctcagcgggctgctcgggttcttcatactctttttccatcatttcttcttcctggtcttcgtattcatcatcaagcaaaaagaatgacttaaatttcgttttcagtcccattccattacacctccgtttgttttcccttatccgacaagcgcagtgccgattctgacaaaagtcgccccttcttctactgcaatttcaaagtcattggacattcccatcgacaattcacggcacggagcgtaacccaaatgcagcgattcaatatcccgctgcaaagttttcagcccgcggaatgtgcgccggatgacgtcctgatcttccgtaagcggcgccatcgtcatcaagcccgcaacgcaaatatgcggaaaatccttcagtttacggacaaaatcaaccacttgcccgggcgccatcccgtgtttcgattcttccccggaaacattcacctgaataaagcatttgatttctttatccaattttgccgcccttttttcgatttcctccgcaaggctcagtcggtccaaagagtgtatgtagctgactttatcaataatgtttttaacttttcttgtctgcagcgtcccgataaaatgccagacggggcgggttccgagcgcctcgtattttgccagaaggccgtcgtctcggttctcgccaagatgccgaatgcctgcttccagtgcctcttttgccctttctgttgtgacatatttcgttactgcaatgatttccacatccccgcggcttcttcctgccctttggcacgctttttcaattttttcgttgatgtgcgcgaggttttccgatactttcatctctccggtgctccttttataccaataaagccaagcattctcccggcagagccgtgatcacgccggtgcgaaaaaaagtcttcttcacaacaacttgtgcacaggctgctgactgcgatccgactttccggaatgcctgcctgctgtaatatgattttatttaactgctttaaatcgagcgcatactggccgggtgatttttccgcgtacggcaatttttctcctttgccggtccaggggcggacagcctggatgacacggtcatcgacaagatagcacttgccgcaaatggacggtccgatgacggcttctatttcatcaagcggcaccccatcctttacccatttttcaaccattttagccgcaatcccgcgggtggttcctttccaccccgcatgtgcgatcccgacgcggccgtacttcgatgcgaaaaagaaaaccggcacacagtccgcaaacgccagcacaagcaagatttctttttcatcggtgtacaatccgtccgtatgcggaaaagaggaacggtattcagccgcccccttgccggcatctttgcgcgtggcccgttgcacatggtcttcgtgcgtctgttcggcgccgatccagtttgataaagggaatccggttgcacttgcaacgatctcccggtttttcctgaccgattcaggatcgtcgtccacatggaaagcaaggtttaaactgccgggaaaatttttgcttgtgccgccgtttttcactgtaaatccggcacatatcccgtttttttgccaggcgccgacagcataatacaatgcctgtgtttttacaaacggttctctcatcacaccctcacccggtttctcttttgtactattatacctttttatccatatgtcttctatacattttcgcattgaatgcgtttttttccgtactgattttatttatagcaaatttcatcaaaattctctactttttagcttaaaaacgggggatcatctggaaatttcccggatgtaacgggtttgtaacgaaactaataaatggctgttacttttctgttatattaaactgctactctattggtataaatcacttacatagaagaggtaatgaatttgaagaaaactttggtatcattactgactgtatgtatgttgtcaattggaacgggacacgcatttgcggcaacaacgacatatacggttaagccgggagattcattatataaaatcgccggaaaatatcatgtgaccgtggcacagttgaagagctggaaccacttgaggtcaaatgtcatccgggtgaagcagaggctgaaaatccagacgaaaacgcccgcaaaaaaagtttcgtcttcctcttcttcttaccgcacgatgacggtgaaagcaacggcttacacagcgggttccggcggcgggattacggccaccggcatcaacttgaaaaggcatccttccgcaaaagtgattgcggtcgatccaaaggtgatccggctcggttcgaaagtgtacgttccgggttacggtacggcggttgccggtgataccggcggggctatcaaagggaaaaaaattgatgtatttatttcaagtaaaaagaaagcccttcagtggggccgcaaaacagtgacaattaaagtgtataagtaaaaaacggctgcgcggccgttttttttttcttttccaggccacgcttattttttcggttcctgcagctgctgctgtgtataggccgactctttaaacctgacgaggataacatcggtgccgatttttacgatgttgctccacgggatgaccacttcgtcctcttttccaaataagccgaacattttccccgatgagccgccgacaacgatactttcaattgtgccattatccaggttgatatcaatatcttccacgtttccgagttttctgccgtccgatatgctgacaacatccttcacttgaaaatccgaaatccggaccatctgctctcccccctgctgtctttccgccatgtaatacaagtttatgcacgggaggagcattttacgaatagaaaagcagcgagcgttatcggctagcggattttccggcctcttccctacggtaagcgggcatcggctcgttcctcgccgtgtttcctttatcccacattaacgggcagtaagaaccccgccatgggcactcagaaattacaccctagtaagttagacggtggcaactgcccgtaaatgtccgattggttcaacttgcaatcatcagggcaatggccctgatgattgcagtttcactcaatctcagtcagaggcctaataaaatccgtacgccgctgtacagtcgcctccgcttttcttattgtccagctccggctcctagcggctagcggatttttacgtcttctcctttcgataagtcggcatcgattcacctgtcggctcatcgtgtttcctttatctcggtcgaagactacaaaatccgtacgccgctgtacagtcgcctccgcttttcttattgtccagctccggctcctagcggctagcggatttttacgtcttctcctttcgataagtcaacatcgattcacctgtcggctcatcgtgtttcctttatctcggtcgaagactaagtcgcctccgcttttcttactactgtatatttttgttcatttgtttgatggctgctttttcgaggcgggagacttgggcttgggagatgccgatttcttctgcgacttccatctgtgtttttccttggaaaaaccgtttgcggatgatcattttctcccgctcgttcaggcgccgcatcccttcctgcaaggcgatttcttcaatccattgcgaatctttgtttttttcgtcactcacctggtccatgacataaatcggatccccgccgtcgttataaatcggttcaaacagcgatacgggatcctgtatggcatcaagtgcaagtacaatatcttcgtgcggaacatccagctctctggcgatttcttctgttgtcggttctttcgaagtggcgctcatcagcttttcccttacttgcagggctttataagcaatatccctcaaggagcgcgatacgcggatcggattattatcccgtaaataacgccggatttcgccgataatcatcggcacggcgtacgttgaaaagcggacattttgattcagatcaaaattatcgatggatttcatgagtccgatacagccgacttgaaacaggtcgtccacatattcgccgcggttgttaaagcgctgaatgacgcttaacacaaggcgcaaattgccattgaccagcttttctcttgcagacgtatcgccggcatgcattttctttaaaagatccctcatttcctcatttttcaaaacgggaagcttggaggtatccaccccgcaaatttccacttttttgcgcttcaaatcttttccccccttcaggactcaggagctgctgttcaaaaaacagtatctccccgggtgggaaatttatgcactgcgcaaaaagcgggaattgcctgtggaagatgcccggacattgccgttcctgcttcccgcccgcctgcaaattttcctgctataccattttattgaattctttacgcaatcttttgattattcttttctcaagccgtgaaatataggactgggaaatgccgagcatatcggcgacatctttttgtgttttctcttcctgccctttaaggccgaaacgcaattccataatctgtttttcccggtccgacaaacggtgcaaggcgctgtaaagcaattttttatcgacatttgcttcaaggtcccttgtaatgatatcatcgtccgtgccgagcacatccgaaagcagcagctcattgccgtcccaatcgatatttagcggttcatcaaacgaaacttcagaccggagcttattgttccgccttaaatacatcaaaatctcattttcaatacagcgggaagcgtatgtcgccagtttgatcttcttttccggattaaacgtattcacggctttaatgaggccgattgtgccgatgctgattaaatcttcaatattgatgccggtgttttcaaatttgcgcgcaatgtaaacgacaaggcgcaagttgcgttcaatgaggagcgaacgtgctgccttatcccctgccggcagtttttttaacagcatttcttcttcttctttggaaagcgggggcggcagggcttcattcccgccgatataatacacttcatccgctttcagcccgagcttgaacaggagtttgtaccaaaaataagagagtttcaaccgtaaatgtttcacattcatcctcctttaaagtcaccatcaggcggattgcgcagcttctgccatcatttgcgggtggacaatgcagctgaatgcatcatcgccggataaacgttgtgccgaaaaagaaaccagcactttttttacaggccatgtccggtttccgctcgtcagttgcacctcatccggcttgtacgccaaaagaagcgattgtttcccgaccgtttttgccggaacgaaccggatgcggccggcccattcgtcaggaagtgcaatacttccgtccagcagacgggtcgcatcttccgcaagcgccgcaatttcttcggggagatggtcacggacgggcaggatggaaaggatcatcaccggcagctttgtcagcggatcatataactggttgccgctgtccaccagcccttttactgtaaaatcactttccccgatgcggatataaacatcgacaagctggtcatacttgattttcgccatttcaagcccctgaatccggttctttgaaaacagccatgctgccggaagaccaagcgcaacaaacgcccagctgaccggatcgccgaatccccccgccgcagctttcagcattttcacctgcatgtcaaaacgaaagcttaaaaagtagtgggcccccattaaaatgccacccatcagaaacgtggcaaaataaaaggttaagagatttgaaaaaaaatagcgccacctcttatagccgaaaaccgcaaacaccatggcgccggaaaaaagcaactttacggccgggttgccggcgtaataagagagctgcggcataaagcccatgataatgatcactgaaccgataagcccgcctgaaagaatccggagcaggcgggccggccgttttaaggcaatgcttgtcagccataacagcaggctgtcggcgagaaaattcaaaagccagatggcatccatatatacaaccaaacgcatcccccctgtctccgcctcaaatgaacctgccccccaaaacggccgcttctgcccgggccgcgcgcccgaagcctgcggaatgctgccgcaatgcatgctgtgccggttttcgtgcaccaacccggtgacgttgttgaagggtacatccactaaggctttaggatctccaacccggtgattgtggctgaaaggtacatctgctgcggccttaagggctcccatccggtgaatgaatcatggcacaaaccggccgtcgcagttccggcatactccggctgccaggcgggccgctttgcgcaattgcagcatctgcccttcttaatttgatttatggctagtataacgcacctggagcatcaaagtgtgtcagtttctgctggcaaaaaaacagaacttttcatttttttaaccgaaaagtgtcaggcgtgctttccgggtagtcctgtagtcacgtcggtatgcatccgaaaagaaaaaacccggctggataagcaggcaccctctgcgaatccaaaccgggtttgaaaagtattcaagcgcaaaaaagcccgtctttgctttcaagcgatggcctggaaaacagagacgggctctttcattattttcttctattccggttccgcaaaaaagtcggaatgtcgagtgtatcttcactgtactgaacggtgcgctgcggttcagactggggttcttcacgctttgtttcgcgctttgtttgctgattcagcgccggcctcgactgtccgagcggcgggcgctgcttgccctgggcctgtgcttcttcattaaagccggttgcaatgaccgtgaccacaatttcatccttcaggctttcattgatgacggatccgaaaatcatattgacttcctggtctgatgcggacgcgacaatatcggccgcttcctgcacttcatacaaacttaaattcgcgctgccggtgatattcatcagcacgccttgtgcaccgtcaatggacgtttcaagcagcggtgatgaaatggctttttttgccgcctctgtcgcacggttttccccggaagcgatcccgattcccatgagcgccgaacctttattggtcataattgttttgacatccgcaaaatccaggttgatcaaacccggcaccgcgatcaggtcggaaatcccttgtacgccctggcgcagcacattatccgcttcccggaatgcttccagcattggtgtgcttttatccacaatttccagcaggcggtcattcgggataacaatcagcgtatcgaccgcctctttcatggcactgatgccgccggccgcctggtttgcccgtttgcgaccttcaaatgtgaacggccttgtgaccaccccgaccgtcagcgccccgagttcctttgcgatatgggcaatgaccggcgccgcccctgttccggtgccgccgcccatcccggctgtcacgaacaccatatccgcaccctttaacgcttcttcaatttgttctttgctttcttcggccgctttccgccctacttccggatttgcgccggcaccgaggccgcgcgttaactttgcgccaatttgcattttaatttcagctttggaaaggtttaatgcctgggcatccgtgtttacggcaataaattcaacgccctgcagattatgttcaatcatgcggttcacggcattgttgccgccgccgccaacgccgataacttttatcgttgccaaagcgtctacattggtatcgaactctaacattcactaatcctcctaattcgtattgcgtatcttatcccggtcctgctgccggacgggctccggttttccgcacatgatgccggcaggctattcgaaaaacaaaccaaagaattttttcattttcgatgaaattttttcttcctggccggatgcttgtttcggtttggactgcggttttttcgccggtttcggttccgcatgctccattccggctgccaccaggcgggaactgacatttttcccttccagccgcgcatttttcgcggcatactggatcaggccgaccgccgtcgtgtattgcggctcacggacgccgatataatccggaatggcgactcttacgcggttttgaaagaccgtttctgcaagctccggtacaccgggcatatttgcagtgccccctgtcagcacaatcccacccggcaaatcatgaataccgattttcctgagttcctgctggataaacaaaaagatttcttctaatctagcttctataatatcagaaatttgtaattggttaaattgttctttttgttcgctgccgatgatctgcacatcaaaaacatcatcttcgagcgcatcccggctgaatgcgtgcccgtgtttcagtttgattttttccgcatcttccgttgaagccctcagacagatggacaaatcttttgtgatatggtctccgccgacgggcagcacgctcgttgtccggatatggccgttttcaaaaacagccagcgtcgtcgaaccgccgccgatgtcaacgagtgccgtcccgagttccacttcatcttttgacagtgcaatggcgccggctgcaagcggcatgaggacaatttccgcgatggtcaggccggccttttccacacagcgcaatgtgttatgtaagatcgttttggaagtcgtgacaatgatgccttccatttccaatctgacaccgatcatcccgcgaggatcatgtatttcatccaaaccgtccacaatgaattgtttcggaatgacattcacaatctctctttcgggaggaatagaaagcacttgcgctgcatccatcactctttgtacatccccgtccgtaatttcacggttttcgctctggaccgccaccaccccgtggcacggctgcagcatcacatgattgctggcaatgccgacgattacgtggtcaattttcatgccgaccattctttccgcttgctcaattgcccgcctgatggacagtacggtttcatctatgtctacaatcgatccttttttaatgccttcggacctgacattgccaaccccaataatatttaatgaatcattgcccaattcggcaatgatgactttcgtggcagatgtaccgatgtcaagactcacatatatttcactgctgttcatactgcggcacctccctttgcctttcgatcaaacgcaatccgcctatgttaaagctccatttttcccaatgcgtctcttctgaggcgggcttttttgccgttccgtccgtggacccgcctgaagcccccattcaaaaagatgagtataaagaaagtattcttcgtcatgatgaaattcccttttttcaatcggacttttttcattttcttttggttatcaaaatatttctagtctcaaaatatagcaattcctaaaatttggtttcatcataagtctacactaagatggacacggagaaaagcgaaattttttcatgttcacttcgaatcgtaagctttaaaatacgaaccgacttcgaggtcaatcacaccttttttcttcgggtcaagctggctgatgatcgaagggtaatgcgccattttttctgcgaacgacggaatgcttgcgcgcacttcaaaaccgttattcatgtacaaggtgacaaggtcacggtcaacgtttgaaggggtatagcggacttccgaaatggcatttgtgatcgaatccggcaatttttgcatctggcggatcatttcatgcaaatgcgtatcctgtttgaagccggtaaatatcaggcttgcggacggaatttctttcaccgttcttttgacgaccgaaccgttgtccaaaaccggcaaaaaaccatttttctgctgtaaatatccgattttttgatgctctttcacttttatgtaaagcgtattcggcaaggaaatgctcattttcaccgaatcaatttcagggatggatgcgattcttttccggactgcgcctttacggatattccatatattctcacccgtggcaataccgctttttttcaggatgtacggcttgctgaccgcctcattcccctctatctgaatgcgatggacgcggctcagcggggactcaaggtagatgatcagcatcaccagcataaaaaaaaccgtcagcagcatgatgagccgccggttcgtttttcggcggcgctgctgctttaatttcgggatccggtcttccagcgaaacgatgtttttgtcagaccgcgccattttgttcctccctttttatttgccgcatcatgatttggcttttgcggccagattttccatcacttcataaagccgccacgaagcgtcacgaatgccgagcttgcgggcggccgcctgcattttctccatttgttcccgatccagtaaaattttatcgatcagggacacgagcttcgcggaagataaatctttttcaagcagcataaaagctgcaccgttttccaagagtgttttcgcgtttttttcctggtgattatttgtcacataagggctcggaattaaaatactaggcaggccgagcgccgtcagttcggccaatgtggttgcgcccgcccttgagacgacaagatccaccgcacgcagcacttccggcatattgtggataaacggcaccactttgatatttcccttttcgccgatcagtgcaatttcttttttgacggcctcataatgcacatcccctgtcgcataaatgacctggtaatttttttgtgcaaaattggaaaaagatttcacaaccgcttcattaatcgggcgtgccccgcggctcccgccgaaaatgagaacggttggaagcgtagttttcaggccgaaaccggaaaggacgtcacgccttttctccccgatcacttccgatgcgcgcggattgcctgtcagtactacttttttctcatcaaaaaaagattttgcggattcaaagcaaatggccactttgtcaacgtaccggcttaaaaacttattcgtcagccccggcacgctgttttgttcgtggataatggtcgggatgtgcagtttggcggcggcgtagacaaccggcccgcatacatacccgcctgtgccgatgacaacatccggcttgaattcccggatgatttttttgcaccgactcacgccctttagaaagcgggcaaccgttttgacattttcaaacgaaagggagcgtttaaaccccgtaatatgaatcgatttgaacgaaatgctttcccgcggcacaagccgggattcgagccctttttccgtgccgatatacaaacattccgtgtcaggatgtttctgtttgatcgttctgatcaatgccagggccggataaatatgcccgcctgttccgcccccgctgacaatgattttcattttttccacctcaggacgccgtgctgggttgcacgggtatcaatatatgatgtttgaaccattctttttcctatattactatattttaaacgacaatgggtacacagtaaaacgattattatcaaaatgttaactagttgtcaaacgaaaaaagaacccctttatgaggttctccttccgttacagccgggaatggcggctgatgtttaagagcacgccgactgcgacaagcatcaacgtcaaagaagagccgccgtaactgatgaacggaagcgtaatgcctgtaaccgggatcaggccaatgacgacgctgatattgatcatcacctggatcgcgatcatggaaataatgccgactgcgagcaggcttccgtacagatcgggtgcgccaagcgcgatccggattccgcgccaaagcagcagcgcaaacaaaatcaggacaaaagtcccaccgataaaaccgagctcctcggttagaatggcaaagataaaatcattttgcggttcaggcagatagtggaatttttgcttgctctccccaagccccatgccgaacaggccacccggaccgatcgcaagaagcgactggataatttgaaatcctttcccctgcggatcggaccatggatcaaggaaagaggtaatccgtgcgattcggtatggagccgataaaacaagagcgacaaaaccgcccacaccaaggagcccgagcatggcaaaatgggcaatgcgggcgccggaaacaaaaatcatgatgatgcatgtcccaagcatcaccgttcccgttccaagatccggctgtagcataatcatcccaaaagcaacaaaaacgagcgtcaaggccgggagcatgccttttttaaaagtcgtaatgtatttctggttttccgataaaaattttgccaaatacgcgatcagcgccattttaatgaattcggaaggctggatggaaaatgcgccgaccccgatccagctccgcgacccgttccgttcaagcccgatgccgggaatcaacacaaggacgagcagcacaaaacaaatgaccaggatggttttcgcccatgcccgccacgtccagtaatcaatgcgcatcacgaaaaacatcgctgccacgccgagcccggcaaaaagcagctgccgcttcaaaaaataaaatgcatcgttaaatttgtactccgccacgatctcactcgcgctgaacaccatcaggagcccggttgcaagcagcgccagggtcacaatgattaataaaaagtcgggattcgtttttttcgacggcatccgcgcccaccccagaaaagatttagagcttcccgcaaaaaccggcaaaccgcaccggtaaaaaagcggtgcaagcccttatcttaacttatgcacggcgtcgatgaaaatatcaccacgaatttcaaaagatttgtactggtcccagctggcgcatgccggcgacagcaaaatgcaatcgcccggttcggataatgcccacgcggccgggacggcttcttccacgttttccaccgtgcggatgaccggaatgcctgcttttttcgcggtgctttccagtttcggcgcggtttccccaaaagtaatcaatgctttgacgtacttcaaagccgggatcagttcatcaaagccgttgccgcggtcgagccctccggcaagcagaatgaccggctgatggaaagcagcgagtgcggctttgcaggccaggatattggtcgcttttgaatcgttgtaaaatttccgccctttgatttcgccaatatattgcgtccggtgcttgacgcctttgaacgttgcgagcacgccgcggatagcatcattacttgcccccatcagcttggcagcggcgacagcggctaaaatattttccagattatggtctcccggcagcacaatttcagcgcggtccatgattttttcgcctttccacatgatgctgccgtcttttaccgatgcgccgtcttcaacatattccttcgttgaaaaaggaataatttttgcttttgtgaaggagaccagatcccacagttccggctgggcatggttcagaatcaggaaatcatcctctgtctggttccgggtaatatttgattttgcttttgcataagcttcttttgtcccgtgataatcgagatgggcttcataaatattcgtgatgatggcaatatgcggcctgaacgtttgcacgcccatcagctggaaagaagacagctccaccaccatctgctggcccgcgcttgctttttgcgccaccgtggaagctactttgccgatatttccggcaattaacggatcaaaatgcggatccgcttggaaaatttcataaatcaaagtggtggtcgtcgttttcccgttcgttcccgtaatgccgaccatagggcattctgcaattttataggccagctcgatttcggtaatgaccgggatccctttttcaagcgcccctgcaacaagcgggttcgaataagggatgcccggatttttcacaatcagttcaaagccttcatccagcagttcgatcggatggctgccgcaaacgactttgatgccctgttccaaaagcccctgcgcctccgggttctcttcaagcggtttataatcattcaccgttacaaacgccccgagccggtgcaacagagaggccgcgctcaccccgctttttgccagcccgagcactaatacttttttatgttcatattccgtgatatttttcatgttacatccacacctcgatataaattcctaaaatcgcacacaaaaggcctaccgcccagaacgtcacgacaacacgccattccgaccagcccgccagctcataatggtggtgcagcgggctcatcctgaaaattctttttcctgttgtcttaaatgatatcacctgaagaatgacagacaaagtctcgatgacaaaaacaccgccaatcacaattaaaagaatctcaagattggtcagaatcgaaatggcggcaatcgccccgcccaatgcaagcgatccggtgtcccccatgaaaacttttgccggatgggcattaaagacgagaaaaccaagcacggccccaactacggcaaccgaaaacagggcgacatccgcctgtgactggttccatgccaaaacggcgaatgccccgaaagcaatcgctgccgtcccggatacaaggccgtcaagcccgtccgtcagattgaccgcattggaaaacccgacaagccagagaagaatgatgacaaagtaaaaccagccgaaattaaccgatttgtccgtaaacggaatcgagacttccgaagataaatggaagtggcggaaaacgacataaaaaatgacggcaacgagaatctggccaagcagtttctgcttcgatgtaagaccaagattccgcttcatcaccacttttataaagtcatccaaaaatccgagcagcccgaatccgatcgtaacaagcagcagcaggtaaattctgacagtcggttcagcgaatttaccggccatgaccagcgtggatgcaatgatcgataccaaaataatcaagccgcccattgtcggcgtcccggattttttctggtgcgatttcgggccttcttcccgaatgctctggccgaatttcagtctccttaaaaaagggataaaaacgggcgaaagcagcacggaaattaaaaaagccatcagcgttgtaaaaaaaattacctgctcgatcatgctttttccctcccgtgacgcctgcatgcacaaagcagccgcttcctgttttccgcatccgccaaatcatatgtatgagggtttttgtcccgcaattccgggccgtaaaaaataaaagttgtcttcatatccaaatccttgctttccattttttttagataaaactgtaccagttgtgtaaaagcaaaagaaacatcttctgccataaacagcggaaaatcattcggtatatagcggggcacgggcgcatcttttttccaaagcgccgcgattgccccgtgtgcaattgcccggttaatgtccagttcagaaaaagggacgtataatccctttggctggtttacatctgcaaacacgctgactgttgcaaattcgagcgccatctccatgccgcggcccaaactgaaaaggcgggctgtatccccgaatgataacatatgcttcaccgctcctttatcatttccagtgcaacttccctgtcatcaaaatgatgcacttcatttccaatgatttgataagtttcatggccttttccggcaatcaggacaacatcccccgcctttgcacggaaaatggctgttttgattgcttccctccggtcggggatgcatgcataccgctcgccttctacccctttttccatctcgcgcaaaatggcaagcggatcttcgctgcgcggattatccgatgtaaaaatcggataatccgcatatttacaggcaatttgcgccatcaccggccgctttgttttatcgcggtcgccgccgcagccaacaacgacaaagatttttttcttggcaaactgccggaccgttttcaggacattttccagactgtcgggcgtgtgcgcataatcgacaatcacggaaaaatcctggccgccgtttacgagctcaaaccggccgcgcacgccttccatcgcttccgccgttttaatgatcgaatcaagcggcaccccggaaacaaccccggttgcgatcgctgcgagcatattatagacgctgaacttcccgacaagctgcagacggacttcccgtttttcaaacggcgtcacaagcgtgaatgtcgtcccgcgggcgtgcatgtcaatgttttcggccataaaatccgcatcgcggtcgatcccgtacgttatgacaggcaccgctgttacttgttcaaattcttttgatgcggcgtcatctgcatttaaaatggcatatttcggcttatcctgcgggcaggagttcccgagctgcgaaaacaataaacttttagcgcgccggtattctgccattgttttatggtaatcgagatgatcctgcgtgagatttgtgaaaacggcaatatcatagtcgcagccgtgcacccggccttcaacaagcgaatgcgaagaaacttccatcacacagtcggtgacgccgcgcgcgttcatttcatgaaatattttttgcaatgtcaggctgtccggcgttgtgtttttcgtttccagcgtttcatcgccaattttcatatacatcgtgccaatcaggccggtcgttctgcctgcatcccggtatattttttcgataatatggctcgttgttgtttttccgtttgtgccggtaatcccgacaaggcggagcttgcgggacggctgcccgtaaaaccggtctgcaaggagcgccattgcccgttttgtattgcggacgataatgaccggtacatccacatcgaccggcttttcggctaaaatggctgctgcgccccgttttgccgcatcaacggcaaacttgtgcccgtcaaccgtatagcctttgatgcaaataaacagactgtttttcgtgacaagccggttatcctggacaagttccgtaatttccggattcacagcaggcattttcacaaacgacaatgcctctaacaatgtatgtaacttcatttgcttccaacccttcctgttccaaacccttgttgctgcatcttttttgtgtatacatgtaaatacagtccttttctattgtacaaaaaaaacggccattaagctatgaagtcctgctgatttttaaaatgtaagccggagcagccctgttttatgccccttgaaacaaaaacacgggcggccggacatacggcgccgccctgttttcctgcatgcaaatccggattgtcgggcctggcggggcccaagtaaataaggaactggaaagtctgttttactgcatgtaaacccggatcgttgagccttcttccactttcacgcctggttcaggggactgccggatcaccttgtttccggatccgctgacgtcaagtttgagattgtattggtcgttcatcatctcttttttcgtctccccgattaaattcggcactttcaccgttggcgtttcaaaataacttttttctttttccgcctggtttttcaccggcttgacgcccatggcacgcaggctgtcgccgatgatcgtgcccgcgatcggggctgccacctggccgccgaattggatcgtatttttcggattatcgaccgccaagtagacgacgatttttggatcattggccggggcgaaaccgataaaggataaaacataattgttttcgagatagcggccgtttttggctttttgcgccgtcccggttttcccgccgaccggataaccgtccacataagcattttttccgctcccctgtgtgacaactgtttcaagcgcatggcggatttgttttgacgtgttttccgagatcacccttcttttggcaaccgggttttttcgcatgaccgtttccccagtttcggggtcgacgagttcctttgcaatatacggtttgtagaggatcccgccgtttacggcagccgagaccgccgccacctgctggatcggcgtaacagaaaccccctgcccgaaagccgttgtcgctagttcaaccggcccgacgcgatcaaggttgaacaaaatgccggaagcttcgccggatagatccacgccggtttttgtgccaaacccgaaattgcggatgtatttgaacaatgtatttttcccgagcctttcaccgagttcgacaaaacccgggttgcatgaattttggacaacctcaaggaacgtttcgctgccgtgcccgccccttttccagcagtgcagcgtcgaacctccgacttcaaccgcgccggaatcgtaaaatttgtcttttgtcaaattcactttcttttcttcaagggcggcggcaagtgtgataattttaaatgtcgatcccggttcgtatgtgctccagatcggcaggttccggttatacacttcctgcggcacatttttataattgtcaggcgtatagctcggcctgcttgacatcccgagaatttccccggtgtccgggtccatggcgatcgcaatcagcccgtccggatgatattttttttcagcattatcgagttcgcgctcaatgaccgtctggacttttgtatcaaccgttagcttcaggtcaagcccgttttttggcgcttcatattcatccgccatatccttcatctttttcttcccttttgcgtccgtataaaactcgactgcccctttttttccgctcagcgcatcatcataatacagttcgagcccggtcagcccctgattgtcggcgccggtgaatccgagtacatgcgaaaggtagcggccgaacggataataccgcttggaatcttccgcgatatagacccccgaaagcccgaggcggcgtacgtcatttgccttttcattgctgattttccgcccttcttttattctgacaatcgatctgacctgtgtaatctctttatagatcttttctttgtctgcatcaagggcgttccccagtttttctgccgttttcgccgggtccttgacctgcctcggaatgatgaaaatcgtcggggcgctttggttggaggcgatcggcacgccgtttctgtcttcgatttttccccgctccccttcaaaagggatacttctgctccatagtgcttttgccctgtccgtcagcatatccccgagcccgaactggacataaccgagccgcacatctataatgctgaaaatgacaatcccgcaaagcaatataaaaacaagccgctttctcaccgtaacattggatacacgtttcacgagcgcgcctcctttatttaaatctcaaagcagcagactccacggcgcaggaaagatgaaaagtttcagccctgcaggctttctgaaatcctgtaaatccgctccgggcgaaacaagccctttgttgcctttacacccatttatatgcttgtacgcatccggctagtaccttttcacgcgcatgaaaaaaagcaagccttgtgcttgcttttttcggcatcccttctgccgcccgcctatggattcttaaattttacagtaagggcctgcccggatttcacctttgactttgccggaatgctttgtgatacggcatagccttccccgcttatgaccaggcggagaccgagcagtttggcagcgcccaccacgtcacgtttcgaaaagccgcgtatatccggcattaccctattgccatttgttttcaaaaatacttttgcgcccggcaggagtttttcctgtgccccgggttcctgggctgtcacggtatcgccatcgccgagcacaacaggggtaagccccagtgctcttacggcagatgatgcttctgtccggctgtcacccgtaaaatcaggaagcttggcaaggcgtacgaccttcccttttgccggtttaatatttaaatattgcaggctgttcttcataatcgggttaaacagcgctttaaccggttcgccaccaagctcgcctgcttttaaatgcggctgctggacaacggcgtaaacgattaatttcggattgtctttcggcgccatgccgagaaaagaaaagatatagttatcggtaccggttaaataaccgccgccgttcggattcgggatctgggcggtaccggttttgccggtcacctcatagcccggaatgttataggccgtgccggtcccggtttttttattcgtcacaaccgtccgcaaataatcccggacttttttcgcggtgtccgcgctgatcgggttgccggcaacggttggttttgttttttccgtttttccggttgtgggattgaccactttgtcgactacatacggcttcatcattttcccgtcattggcaaccgctgttgccgcctgaatcatctgcattgcggtcacggttgtgccctgaccgaatgtcgtcgtataccgttcgaccggataatcgtataaaattttgccggaagcttcatttggcaagccgactttcgtctttttcccgaacccgaacgcttccaaatattgcttaagtttatcctgcttaatataatcaagcaatgtggcaaatgcgacattcgaagaacgctgcagcccttccagaaaggtgatcctgccccagccgaccccgccgttatggtctttaatcgggtttggcacattttttacatggaattcccctgacttataggtcgcatacgggtgaaaagcgccttcctggacggccgccgccaaggtaaaaattttcatcgtcgagcccggttcataagcggtttcgactgcttcgttctgccagacgctcaaacctttccgcgtttccgggtcaaatgtcggtcgctgccccatcgccagtatcctacccgttttcggatctgccacgacaacaaacgcttttttcggattgtattgcttctggactttgccaagcgcatcttcaacgaaagactggattttcttgtcaatcgttaaatagacattttccccgtttttcggtttggtgacttttttatgcgcgtttggcagaatatacccccaaaagtcgccttcataactgatttttccgtctttcccttccaaagcggcattcatgcttttttcgattcccattacgcctgccatttggccgcccgtctcatttttctgcgcataaccgaccagatgggaggcaaacgaaccgttcggatacgtgcgtttcggcaccgcttcgaactggatgcccggcaggttcagtttttgaatttcattttttgtttgatagggaatatcctgccccgctttcccgaattccacttgaaaccgccctttttgtgtcagaagcgaatagatttttgattcgggcatgtcaatatattttgcaagggcctgggcggttttccgggggttgacaacatgtttcggatgttccggatcaatcgtggctttcgggtccaaaatagcaaccagattgtacgaaacaacattttcggcgatcacttccccgcttgcatcgtaaatattgccgcgggaagcgggaatggtgcttgtccgcaaatactttttcgccgcttttgccgcgagcactttcccgtctgcctgccctgtgatttcaatcgtcaaaaaccttacggcgataataaaaaaggacagaccgaatatgataaataatatcgctgcccccctgtttgtattcagttttctagacttcatttattttcaacaaccttgacattattctcgtccaatttcaagccgagtttttttgccttttcgtaaatacggtcgtagcggcttaattcgcttacttgcattttcaaatcatcggtcaccttgtttttgttctggatcgcggttttcgtatcttcaatcgaccggttggcattataaatcgcagcttccgttgatacgatcttcacggccataatcagaacgaacaaagcaaaaaggcttgcgataatcttttcccctaaagtgatctgcgcgcgtcttgtgaccggggctactcttttttcaacctgttgctgttgttccggcgcacgtttcggctgccttgctaaattactcaaaaaactccctcctctattttcttagcgtttttccgcaatgcgcagtttagccgaccttgaccggttgttcccgcccacttcctcatcatccgggataatgggttttttcgtaatgagttttaatacgggctcgtattcttttgggatgacaggcagcccatgcggcaaatctcctgcactgctgaattctttcaatatatttttacaaatgcggtcttccagggaatgaaaggtaatgacagagacccgcccgcccggttttaaaagcgaaatggcatccgttaaagaagtttcaaaagcggataattcatcattcacggcaatccggatcgcctgaaagaccctttttgccggatgcccgccttttcttcgtgcgggtgcgggaatcgcttctttaattagatcggccagttcaccggttgtttctatcggttttttggcacgggacgcctcgattttgcgggcgatttgttttgaaaacttttcttccccgtaacggaaaaagatccggaccagtttttcatacggccattcattgacgacttcatatgcggtaagcggggcatcgaggtccatccgcatatcgagcggcgcatcatgctggtagctgaatccccgttccggtgtatccagctgcggggatgagacgcccaaatcatacaagatgccgtcgacagcctgcacaccgcgcgctttcagttcagattttaaatagcggaaattgcttttaataaaagtgatcctgttttggtcatgggcaagcttttctttggcatgctgaatcgccgtttcatcctggtcaaaagcgtataaatgcccgccggtaagctgcttaagtaaataggcgctgtgccccccgccgccgagcgtgcagtcaacataaatcccacccggtttgatatgtagcccgtcaacggtttcttttagcaaaacggtcttgtgtgcaaacatactgaatctcctatccaatcgaacatgttaaaggtcaaaatcgatgaggttttccgcaatatcggcaaaagaggcctccgattcctgaaaatattcttcccataaatctttgctccaaatctcaattcgattggaaacgccgagcaccacgcattctttttcgagtttcgcgtaggaaaggagcggtgcgggaatcagaatgcgcccttgcttatcccgctcgcattcggtcgcccccgaaaagaaaaaacgtgtgaatgcgcgggcatcttttttcgttaacggaagggacttcagtttttcttccacctgtttccattcatccgcagggtaaccgaaaatgcaacggtccagcccacgggtaatgacaaacgtatcgccaagctgttcacggaatttggccggtacaatcaaacggccttttacatcgatattgtgccggtattctcccatgaacattggcgcgtgccccccgcttcccacttcatattaataatttaccacaatcccccacctttcaccactttaatttttatattctccccgcgcgcttgatttcctgctttttgcaagaaaaaatcaattgaaaacttgccggccgtaaaacccgattccagcatggccagaccccggcagcccgctttttcacttcgcaaaccaacgccccttctcccctgtttttttgcacaaaaaagccggccgctgtcagccggttaaattttaacgagtttatgggtgccgtcaaatgcgaacggcagggcggcaagggtgtggataaagtctgtcccgtatttgttaaggaaataaaaaaggttccaaaccctttcttggggattgccgtccgggcgcaaagcacgttcgacccgtgcgtatttttcaaggacggcatcatgtttttccgcaatctcttcatccactttccgctgcaaaaacgcaagctgcccgaggtgaaaatcgagatttttgcgggcaagcggttgcagcccctttccaattgcggcgaaaattttatcgtattgcattttcagcattttttctgtttctgcaatgagtgcgtccatattctcatcttttgcggcattccaatatttttcccgctctttccaggtcccgtattttaatacatgcccgatatcgagttccagttcctcgatatccctttggaccgctctctcaagcagcgtaatgttgagccgcggcacaagaggcggcataagaatccccaattcttcaaacacccgcttcagctcggcccagtacgcaatttcgcccggcccgccgataaacgcgagggttgggaagagccattcctgcatgagcggccgtgtgacaacattattgctcagccgttcagggcttttcgcacaaagcgcgagcaacgcttcctccgtaaaaaaggggctgccgcctttcccggtaaatccgccgtgctccggactgtacgcaagcaaaatccgttccttcccgtcataataaaaaagattcaacgcccggctcgaaatgtcaatcgcttttggaaactcaaaccgcgcgatttcctgctgctgccagaggaccgcttccgtaatcgtgccataatcccggatcatccgttcaaaaaacggcgcctcgatcttccgcaagtgcgcatcagccgaatcgatgagcagcaccccgtacgccttgaaaagatcgtggatcatgcaggcaaacaggtcagaaaggctttgcgccctgtctgcaaacgcctccagccgggaaagaagggcattggtatgttcggtttcgccaaatgcttcaaaaactttatgtatccatttctttaaatgggcaggatccggtttggtgtcagagatcatttttttctcaagcggcccttcagcataactgaatttttttaaacgcctttcctgttcagcataaatatgattcacttccaaatagtcatggtcctcgcccgctatccagaaaacaggcacaaccggaatttgaagggcttcttcctgctcactggcaagccggataatggaaatcagtttatggatggtataaagcggccctgttaaaagccctgcctgctggccgccgatcacaacagcagcgtccggctgccttaatttttccaaggaacgggccgtctccggataaatcccaaatttttccatatagtgcccgatacaatctgccagcccttcccggttaaaagcccgtttttttaaatcttccactcttttatggaaaacagaagcatccgttatgtcataatgaaaaaaatcctttacaggagatttttgcgcaagatagagggaagcgaaccgattcgttgctggaattgaaaagttttccagttccatcaaatgattcttcctttctcgttttcattgattttctcattgagtatagcatttttgtgaaaaaaagaaaaaaagcctgcctgcccgtttcaaggatgcccgtttcaaaaacagaaggcctgtttccggccgcttgaggcacggcggcagcaccgggaacgcgcctcaccccttttcttccatccctttcaccatttcataaagggcggacgcaagcggaacccggctgttttgacgggcagccgtttccagcatgtaaccgagaatcgcgtcaatctcggtccgtgctccttttttcacatctttcagcatggatgattcattttcgcatgtatttttgcaaatgccggtggcttcctcccacatcttttcccgcgaaagtttcgggaatagcgccaccagttcttcaaataccgcgcggaacacacgggcataatgcgggttgctgacaagttccccgttctttgcctttaaaacggctgtgagcggattgatgacggcattggcaaaacatttgcgcaaaagcatcagctcataatccggctgcatcgtgaacgggaatgcatctgtatgcagctgcacgctttcatcccattttccgtggtagacggcgatattcgttttgccgtgcccgttatgcttcaccgttgtgccgtcaagccgagatgcaccgtgctccaccgtgccaacaaggatcgttttttgcggcaatttttcaagaagagccagatggcccatgccgttttgcaaaaacaaggccggcaccccgccatcttcgtgttttaaaacggctgcaacagcgggaaggtcatattgcttgacggcaacaatcaccaaatcctgggaggaaagtgaagagaacgtgccatccgctttgacaatcgtcctgaacgaagatgcgctgtcttttacggtaatccctttttcattcagctgcccggcctgtgccttcgtcctcggaaacagggtcacttcatgcaactttccaagccagcccccgtataataaaccgatcgcgccagcgccaataatcccgattttcattttgcccgcccctttccattttctttgctccattttaacaggcaataagggaatggaaaagaaaattccggacaaaaaatgaggtgcgaccgcttacacgtatttctttcattcttccaattgtttgttatataattataatatcaaccggttttatgcaagaatcgccgccatgctgccgcgacacagcactataaagagggatgggggaattaatatggcatatcaagtggaaaggctgaaagtgaactacaaaacgctcgaagaattcaaacagtttaaagagtacgggcagcaggaactgtccatgctcgaagatttgcaagacaatattattgaagacaacgccgactcgccattttacggcatctattttgccgataaactcgttgcgcgcatgagcctttacgaacgggatgcaaaatatgatctctattttgatcctccgcaaacatttttggaactttggaaactggaagtgctcccgaactatcaatataagaattacggccgggcgcttgttgattttgccaaaagcttcgggttgccgattaaaacaaacgcccgcctgaagtcgcggggattttgggaaaaaatggggttcaaacccgttccttataatgttgagcgtgatttgagcgaaaatccgtttgtctggctgccgcacggcgtgaagctgaaagacgcaaaacaggacaaaaaaacggcctcctcttaaagaaccggattccggttctttttttgccttttacgaacaaaaaatgtcccctgccttttaaggtccaggggatgtccgccgctttaatcctgttcagccagctgccgtgctttttccataatggaaagaagcgcactgtattctttttgcagcacttcatgcttttccttttcttcaagatacttttgaagcagtgcctcatatttggttttccattcctctgtaccgcgccgggatgcggacaacttcccgttctcgtgcctgcttttttccgcaagctgctgaaggatacggatggcatcaaacagcgtcgcttttgcctgcggcccttcttcagcaggcgctctcccggaatcccggacaagctgttttctttcctttctttctttttttgcggcctcaatttcggaggcgtactgctttctcacataagaattccacctaaacccgcatgccgctgcggtccggttcatccgcttccctgcctcttcaaacgcccggagctgcgtgctgccttcgcggatatggcgcaacacaatgtccgatagcaacaaatcttcttcctttgtccaggcatcctgtctgactgccggcatatcttccccctccatcctttttaatactattcatatgccgttaatagaaaagatagacgaaaagccgctgcaaaatttcgaggaaaaagggaagaacaggcaggggcttatggcgggaagggaacgcgttttttaggcaaataaaaaagcacgggtttgcgccgtgctcttttattatttatttaccacaactttgtctttgtaaaaaccgcaagatgggcatacgcggtgcgccattttcatttcaccgcatctcgggcattcaaccatgccgggaacttgcaatttaaaatgtgtgcggcgttttctttttgccgttttagaagttcttctaaaaggtacagccattcttcccacctccttataagagatcagcatatcattttagccgaagatggcggttattcagaatcctggtcaaaaaatttcgcaaggccggccatacgcgggtctaccgctttttccgccttctgctccatttccaaatactcgtcctccgtcagcacctgccagttgtccgtatgcggcagttcgccttttttagcttcctcgctgaaaacttgcatgggaatgtcgagcaaaatcaattctttcataaccgggatcaaatcaatgacctcattttcggcaacatgcacttcttcatcttcagcgccttcataatcggaaggctcaagaagaaacgtttctgtcgatttcaagtctaccgggtaatgtacatcaacaagcgtccgggcacaaggcagcacaagcgtcccttcaacgtgaaggtcaaacgtcaccctgccccgcgcaacgctccccgttcccgttacgtggaaaggcgaggccccgcggatttccgaatcggtttccattaaatcttttgtaatatcaaccgacccatctatctcaaagcgcttgtcccgaaatttttgcaattgaatggcagaccatttcactttcatcaccccaagacaacaaaggtaattatagcttccttcataccttttgtcaatattttttgctttacaaccattatgtccaaaacgaaaatttttcttcaaaacagaaaccggcctaagctttttaggcgcatcctttttacgctttcgtctcaagtctccccgttttttcaaaaaattttgcagccggcaggattgctttttttgccggttatggtaaaaataacttatcccaaacggatttctttaaacattcaaatcttccggaaaggggaatcacaatttgaaaagtaccggcatcattgtggagtacaatccttttcataatggccatctgcaccatcttagcgagacgcggcggatgacaggcgcagagtgcatcattgccgttatgagcggctattttacgcagcggggcgagccggcgcttgtttcaaaatggacgcgggcggagatggccgtattatcgggcgcggatctcgttgtcgaactgccgtatgcatttgccgtgcagcctgccgaaacatttgcggcaggcgggattgccgttttggacgctttgcagtgcaaaagcttctgcttcggcagcgaatccggcgacatcgaagcattccgccaggcggccgccgccctgcttcaaaacgaggcggcatttaacgcatccgtcaagcgcgaggtcaaaaaaggcatcagctatccggctgcgctatcaaacagctttcaaaagctcgccccaggcagtgcgctcgatttacgttcgcccaataatattctcggctttcattatatgctcgcggcagccaggcaaaacccgacgatggaggcttttaccgtccaaagaaaagcagccgggcatcatgacgccgcgataaccggtgaaattgcaagtgcgagcgccatcagaagaaccatcttgcaaaccgaagatctgcacgctgcccgcccggcgctgccggaatcagcgtttactatgctgaaccggcaccggaacggaaacgggcacttcctgcattgggcgctttactggccttttttgcactaccggctgctttcctcttctgaagaggaactgcgcgacatttacgaagtggaagaaggcattgaataccgtttaaaaaaagccgcggtatccgccaacagttttcccgatttcatgagaaaagtgaaaacaaaacgatacacatggacaaggctacagcgaatttgcacccatttgttaaccaatgccaaaaaaacagaaatcaaaaggcatgcggcaaaaccggcgtatatccggctgctcgccatgaacgaaacgggaaggcgctatttgaacagcgtgaaaaaaacggtaccggttcccgttatttcaaagttttcgctgcaaactgccccgctgcttgcaccggacataagggccgcgcggatatatgccctcccgcttccggcaaatgaacgggaaagcctgatggcgcgggaattcagcaagccgccttttttcgcagacgaaaaaacggatggcgcgtgaatctgcaggctgcctttttacaggcggaaagcttcgggcatggggctgggaataaccggatgaaacgcaagatgatgaggacggctttttgcaggggaaaaagctgcatgcgtgcaggctggcaccttttttgaaagcgaacaagccggatcacacattacatgccggcttgcaggtaaaacccggaatgcgtgacggccttccccttattagggaaaagccgctaaaacaagcggctttccggttatttctgtttcagggcgtttaaataggcgagtgcatcatccagtgttttgaccggtacaattttcatgttcgtcccgatttctttcgcggccgctcttgcctcttcgtaattcggcttgatgccagggtcggcttttttcatttcgggtggaatcgtatcatccggggcaaagaaaatgtccgcccccgctttgtccgctgcaatcacttttttatcaattccgccgatgcggccaacctccccgtttggcgaaatggttccggttccggcaattttatagccttttgtaatgtcctgtttggtcagctggttgtagatttccaatgtgaacatcagcccggcggaagggccgccgattttttcagtatccattttcacggccgggtcggatttgatggtccggtcatcgacaaggctgatcccgattcccgttttatggtggttttccttaaattttgcaagcgcaacggttgccgtcttcgcctttttctggcgcacataggtcaattccactttgtccccggcttttttctttgctacatagtgcataaactgtttggaagacttgaatgcatggccatccacttttgtaattctgtctccggctttgagcacttttgcggccggcatcccgtcatatacattcaggacataaatcccttcataacgggagctaaacggccttttcgccttcttaaaagcagcctggatagcattatgttttgctgattccattaaataaagctgatagacattgtattcctcgtccgtcatatttttatccataatttcacgaaccggcacgacatcctcgtgttttctcacttttgcccaaagatacgtatacggattcgcacggcccatacggacagtcgtcagcataaactggcctttttcaggatagccaccttttactttgatcagcggggcaagctgcatggcgctccccggcatttcaatataataaggcagcggcacaaacgacaggagggcaaggatcagcactgccgcaatcagtatgcgccgccggatgtttcggtgtttcatttgtcgagctccttccatttttccagcaattgctgtatttcaattacggattgttttgcggcttcttcccctatcttaatgatttgtccggcatttgtaaaagccattgaactgtacatcgagacatcggggcggatcgaaacatgggcttccgttttccggctttcggccagttccatctgcatgatatcgatgctttgcataataacatcataaatatggcggatttccgcttcttttttcatggcggaaacatccaccccgaccaaaagctccgcccccatttcctttacaacagacaccgggacgcggtccgccacgccgccgtccacaaagagatggcccttgatttttttcgggacaaaaatgccggggatggaaatgctggcgcgtaccgcttctgcaaccggcccttttctgaacaccgttttttcgccgtttgaaagatttgcggcgacaacggcgacaggcgggttcaattcttcaagttttttcccgtgaacgagcaagcggatcagatcttcaattctttttcctgaaatcaggcccatcttgccaattttaaagtccaaataatatttgcgtttaaatgcgccggaaagcagctccatctcgcggacagtccgccccgccccatacagcgccgcaaccagcgccccaatgctgctgccggaaatcatatccaccggaatgccttcctcttcgaaaactttcaatacaccgatatgcgcaaaacctctggcgcctcccgagccgagcgccaatccgattttcgggcggcccgccatcgtccccctcctcgtgcttctctttcgtacagtttatggtctaatttacagacctatgagtatatttgatttataaggacaagcgagcaagtgctgcgtattgaaagacaggggaggaacacagattgtaccagtctaaactcaaaagcgccattttggccttcagcgtttcgataatggcgatttccatgattgtattgccagatgaatcttttaaagcctccattcagggtttaaatatgtggtgggaagtcgttttcccttcactttttcctttttttgtcatttccgaactgctgatcggcttcggagttgtccgcttcgtcggtgtcctcctggagcctttaatgcggccattgttccgtgttccgggtgttggcgggtttacctgggccatggggcttgcttccggcaatccttcaggggcaaaattgaccgcacgtctccgccaggaaaaacagattgaccggattgaagcagaacggcttgtagcgtttaccagttcttccagccccctttttatttttggagcggtcgctgtcggctttttccataatccttctctcggcattttgtttgccgcggcgcattatgcgggcaatattattgtcggcctggtgatgcgtttttacggaactggcgaggatacaaaaaggccgaaaaagaaacatacctttcttttaaaagaagcgcttatcgttttgcatgcgacaagaattaaaaacagcaagccgatcgggaagctgctcggggacgcggtaatgtccgccatccagacgctcttaatgatcggcggatttatcatcctgttttcagtctttaataaattgcttctgtatatgcatgtcacatccgtattaggcacgcttgtctcccagctacttcacctcgcgcatttttcggaaaaactgagcatcccgctcatttccggccttttcgaagtgacgctcgggatccaaatgatcagtgaagtccaggaatcccccctgcttcagcaggtcatcgccgcaagctttatcctcggctttggcgggttcagcatccaggcgcaggtggcaagtattcttgcccagacggatatccgtttccggccgtttgttcttgcccgcgtgctgcacggctttctgtcagctatgatcatccggctcatttggaatccggtatacttacgcttttttgccgaaaaaagcgcgtggcaggaagctttcagcatgccgggtggaggccgcagcttgtacgcgcgtttgacaaattggcttgaaatttacgggccgctgttcaccctgtcctgtcttgtgctgtacattttcctttattaccgatcctgccgggcggaccgggcctgacagaggcgcaaaaaagcggggagcattcccgctttttctgatgccttcgcaaattttccggtacacagaccggtaccccgggtcggccctgtttttttagggatttttagtgccgtgtatgaacgcggcatacccggttttagggagccttattggccggcgctttaagtgcaaaaccggccccgcccgggattttcccgtcgctttatgtatagccggcatgtccggtccccggtcgctttttctattgcccctgaaatttctttttcaatgctttatgcacaaccggcggtacaagttcagcaatattgccgtggtatttggcgatttctttcacaatgcttgagctgagaaaagaatattggttgtttgtcatgataaaaaaggtttcaattctgtcattcagcacacggttcatggacgtcagctgcaattcatattcaaaatccgaaacagcccgtaagccccggataattacatccacttttttggattccgcatattccattaaaagcccctggaaggaatcgacttccacattcgggatatcttttgtcacttcccgaatcagcgcttttctttcttcaatatcgaacagcggctgttttgaaatattattcagcactgccacataaactttgtcaaatacttttgcccctcttttaataatatccagatgcccgtttgtaatcggatcaaagctgcccgggcatatcgcggtcttccccacgggtttcatccccctttttcgtgtaaatcgtgatgccggtaatgccgtactgtgctgttttatatgtaaaaagattgcccactttttcaggcaaggtcagcccggcgtcgtgctcgcaaacggcgtaaccgttttcacgaagaaggccgtttgccgagataaattccagcatcgcggttaatttttgctttttgtaaggcgggtcgaggaataccgtatcaaaggcaagcccccgtttcgccagcaccttcaatgcacggccggcatcgttccggtatacttcactcctgccttcaaacccgcattttgccaggttggcctggacggtttgcagcgcctggatgtccttatccacaaaaatgactttctccatgcccctgcttaaggcttcaatcccgagcccgccgcttcctgcatataaatcgaggcccaggcctttttcaaaatacgggccgatcatattaaaaatcgcttcttttactttatctgtcgtaggcctcgtccccattcccggaacggcttttaaaacagtgcccttttggttgcctgaaatgactctcatgctggtcaccacgtatcatcagatttccatcttatcctaccatattttccggccgggtggaaaagtttttcaccaaaatttaaagcaaaagtataattcaggaaaagttggccataatgataccagcagcatcaaaagatgttgctgccaaccgcggagaagacttacgtttccccataagttcttcctccgatttctcctctccctttgccttctgtccggaataaggatatagaagggccctgcagtattggctgcagggttttttattttccgcatttgccggagtcccggcacgccgtttcaaaaagccgagccggcatttcgcccggtttattttgcaggaatactttccgaataaaaagaagtgcagtagaatagaaacagcaaatttgtttgtaagtgaggaatagaggatgcagcaaagatttattgaactggggaacggatatacagatttatttgaactgatcgaactggcaaaagcaaaccggcaccggctgcacggcatgcttgcccttcataccatcgttgcggatcaagccgtcacttcacccgtgctcattttaaaaccgaccgatccgggggaatttcaggcgctatacgtttgccttgaagggattccggatccgcgggtgcagccgaataaacggtacagcctgtttgccgaaaccgcagccgctttaggagcggacattgtggaactcgaagtccggccgtcttcgtctttttccgacaaaacccttttttatcaatatttaatcggcatattaagaatgaaccggctaattgcgccgctgcaataaaatatccggccagggcgcggccggatgtgcttgttttaaaacgcgccggacggggcttccaggcagtttttggcacggcggatttgctgattcacacgcagcagggaatgccggcatgcaaacccgggcgcctttataaccctattttatagtcgtattcttttgctttgtcgggttttgcgttttcatattccgtttttaaaaacggcttcatggaataatccactttccttacaaacggaagactttcaattttcgcttttacttgttctatctctttgcggtcacaataaaggacggcatacttcatccttttcgacgcataatggacattgccgaatcttcgtaaatgtttcgtatgcttcatctgatacagccaaatgatgaggccctgccgatctgataacatagcgtttccccttcgtgcttttttaatgagtgtatcataccttttttcacggaacaataaggaaaggccgcagattgcggccttatcgcggttattatgcagaacagctgcagctgccgccggttccgcagccgccggaacaagatgcatcaaaaaacggatttccggtcggcacttttatatgttcagaaacagatttgccaatcagcaggctgatttggtcgagcaggtcctggagggcattttccgcccgcctgaatctggcaacattttcatccagatccatttccctcttggcttcccttgtttctttgttgatgcgtttataatcagggtgatacctgccaaagcgctggacttcctcaaactgctctttcaggcgcgcaaatttccggattttctgttgtgtggcgggatcatgatacatcttgctatagcagtcccggtaattttcggcaatatccgaggcaatgaccattttcgccagtgcttcggcttgggacaaaatttccgcgctttccaatgttgcaagcaaaaagctcacctccacatgatgattttaccatgtttccgcaagctttgcgaatttgcccggtcagctgacagaaatataaaactgcctgtgaatgcctaagcgggcgcctgtgtttttgtccaccacttccagctgcacggcatgtacccctttatcaagcccttttacaacaaatgcagccgtattgtactcgcctttccatacaccatccacataaactttgatttttgccggtttggcatgccggctgcctgaaaaagtgacgcttggaatcatgcattccacaaacaaatcccggccctttacaaaatgccgaactgttgcctggttttctgccgcagaagcagcatccgcttcccgctcctctttgcgcggcatgtgcccgctgcagccggcaaacagcaaacatacagcaaggaatcctgcagccattttcattacgatcactccttgcggttattttccgcaagaaagcgctgatttactcaaaaaaggtaaatttttttcggaaatcaaccttgttcatagatggactgcatcatatgcatcatcatttgtgccatttgcaacccgtttgcaaacttttcaacccgctgagggatcgttttctggtaataatggagcgctgcaatttgaaactgttccagttccccgggatgccttgacaatttccggtaccacaccggctgctcccttaaaaaggttttccattcattcgaccgccggatgacttccatcacttcgttccgcatatgtgcagcccctttctagtcttttctgaatgaaaacgggcccttcggctggggagcccgcgattgcggcgcctgttgcggtcctgtaaactgcgtgatcacattttggacggcggcaatcgcttccgtcaaatgctgcaagtggccctggacctgtgctgtatccaggttctcgagcatcgtgccaagctggttcagccagctgcttttcccgcccgttttttccttcggtccgctgccttctgccgcgtacttttcccagaccgggtcatcttcgcccagtatataccattcttcaaagaaatcctgtaaagatttttttccgccccggacttcttttaaaatcaaaggatgggtttttgtaaatgctttaaacttttctacggaaggatgcaattttttcgttcccatttccgctcaccccgcgagaagacatttttttcgaaccttggctttctgttacgttcacataccttcctcatttccagcatatgcccgcagcaaacaggtgtgaaggttttcatttcccgtgaattttgatacgatatgggtatgctttttaaaaaaacgcgttaaaagaggtatcaggagatgaaagaagaaatacgccatacttttgaaaaagtggtccaagcggcaacggaagaagacttaatcgtattgcagcaaatgttaaacgggctttccaataagcaggccgggaacgagcgtacatatttcaaagatctttttctgatggaagcggattacggcggggaagaatgcgaggtggacattccggttacgccgttactctacaatcatttttccatcgttcacggcggggtaacagcaaccttgcttgatacagcaatgggcgtgatggcaaacaacctgttgccggcgggccagcaggctgttacgtccagtctcaccattcattatattgcccctgggacgggaagccgcttaaaagcgaaggcaaaggtgatccaccgcggcacacaaacgatggtgctggaaggcactgcctttcgggacgacgggacaaagattgcccattgcacgggttcttttttcattttgaaatgagaagccggaaataccgctgtttaccctttcaaaagccccgggcagcccgcctgccttttttaactatccttcagccggaccctctccagcttcggctggaacggtatccggctatggtgccttaatgaaatcctgggtatagtatttctggtacaccccgacgccaagatgggtaaagtctttctccagcaatgttttccggtggccctctgaattaagccatccctccaccgcagccgggccgtccgtataatgggcggcaatattttccccggccgcagtataagaaacatgcccatcctttaatctttcttttaagtctccatatttgggggagacatgcgaaaaataatggccgtcagccatgtcttcgctgtgactgtatgccacttcggaaagggctgtattccaggccagtttttttaacccgaatcgctccctgacgatgtttgtaaggtcaaaaatttgcctggcgttcgccttttctacgtcaacccatttcgggtcatcctccgggacggattggggcagtactccgcggtacaccatttcataaggatgcagcatcgtcagtgtgtttttatccataaaacggataaaaagcaatttgccgctgaacttatcaagcgccagctgggcataaatgtctccaagacggacaagcgggcggatattcagatcttcttccgacaattcaaagcggtatgagccttcatttgtttgcaccgtcatatccgtatccattaaaatggaactgtaaattttttctacattttctccaatctcaaacggggctacgtctaaacgggttccgacagcgtaaatggtcgtaaccttgccgtttttgacgcctgcctgaaagtaaccggccgattttttcttataaacccaccaatcataaccatatggagacggatccactctttgcggttttccgaaatgtgcggttaacgtttttacgggttttccgatatataccgacatgccatgatccgggcggctgtacgtttgattcttgctgtggtcatgaatgtcagaactgttatccattttcttgttagaggaatggttttgcagtacgccgttttcaggacgaagctggacataaagcccgatcagaaatatgatgacaaggatcgcggctgcttttaaaaaggtacgcaggtgacttcacctctcttgatgttccgtaaattttttctcctttaattcattttattatatattttacagttttaagcagaaaagcaccaatttttttcaaccgcctccgggaagggcagctgctgcggccggctttttgcggcaatgaatatttgcattgcataaatgtttgtattcagataagataaaattgaaagattttaattgcgcggacgggaggggtattcttgcggtttgatgacacgggtttggaaaatatgaaagtggatttgacgcggctggacgatgtaatggaacggcacaagatggtacgtgccgggcaatgggattacgaacgcgtcacatacgatagaaaatttacgattcaggaaggcacctattatcttcgcgtgcagggagttgcaaccgagggggatgtggattcgtttgatgccgtgattcagttaaaggcgcctattttgggaaaatattattatccgcatggtgtggaatacggtgaggacgaatattttccgcacgatctcgtcaagtattgcagaaaaattttggaagcgcttaaaaaagacttggctatatttgcagaataaattgcgccgctcctgtggcccctgaaaacggctggccatagagagcggccttttttaatgctgttccatcagcctctgctgttctcctgcaaccggattcgtttccgggctgccatctccctgttctgtctttgcccattggaaaaagatgcgggcaagcatgatgccgtagacgatttcctgcatgattttcatcaccacaccgccaagctgctgatcctgcagtacaggaagcggcgagaaaagcgccggggagccgtaacgtgcgagtccggagagcatgtcagcaggcacacataaatgcatggacgaaagccacatcgttccgtcggaaaagctcctgtaaaccggatgattggcgaacatgattaaggcgcatgcaggggttaaaagcatggcgcttgcaaataaataagcgatttttttcaggccgcccagcgcatattgcccgggcaatggcgacaaaaccggccaccacatcgctacggctaaaagaaacagcacgatggtatagaggctgtggagaaacggattgacctttacctgatcgaaaacggccggaatgtggtacagggaaaatataatattaaaggtgacaacggcaagcaccggatttgtaaagaaccggacaacgggcgccacaaccggaagctgcatccccttttccaatatccacaccggcatcccgcgcaaaaacagcggcgccacgatgaaaaaaaggacagacatttgcagcatatggacggaaaacatgatatgcccgataagatcgacaggagagcctttgacgatgtaaagcagcgccatcgctgtgcaaaaagaagcggactgcgccggccccggcggcgttgcgttcaaataagaccttttgcataaggacgcaagcagaaaataaagaacaacaaacagtaagatcgtgataaaaaaataagggctccacagtgcacgaaatccgaatatttcaagcggcaccatttccactcctttccgcacccattgcaaatggatttaaagcaggggcgcctaaaaagcgccctccgcttttctttgtccagctgcgggcgctgtcggctagtgaatttccagtcccctcccctacgataagtcagcatcggttcgcctgcggctcaccgtgcttcctttaccccacattaacgggcagtaagacccccgctactggtatgatgaaaatatggcacaataggctgagcgggggtcaactgcccgtaaatgtccgattggttcaacttgcaatcatcagggccaatgctctgatgattgcagtttcactcaatctcagttcggggactgtgaaattcatacgccgacgggcaagcgccctccgcttttctttgtccagctgcgggcgctgtcggctagtgaatttccagtcccctcccctacgataagtcagcatcggttcgcctgcggctcaccgtgcttcctttatctcagttcggggactatgaaattcatacgccgacgggcaagcgccctccgcttttctattcaccaccagatgatggtgaggaatgccagtactgtgacaaatgcgacgagtgcgccgccaaagatgaaaagttttgggccttcatggtgcttatggttcatatgcatgaaataaaacaactgaaatacgacctggatcgcagccaaaagcaggatcaccggaatggtaaaccatttggacaaatgggcacggacggcccagaatgcaataatggtcaaaaacatcattaagataaaactgacgacctggtacttcatttcctccgcgcttttgcggcgccggtattcatattcaacatggcgtctgtccatttgtgcattgtgttccattgtctatcccaccatccccatcaaatatacaaccgtaaagataaacacccagacgacatcaataaagtgccaatacaggcttgccacataaaatttcggcgcattgtacaaattcaagccccgtttagcgttccgcaccatcagtgccgtaatccataacagcccgaacgccacgtggccgccgtggaacccgacaagcgtataaaacgcggaaccgaatgcgctgcttgtaaatgtatgatggtattccgccacataatgatggaattcatatacttcaagcccaagaaaacaagcgccaagcaaaacggtaatcaagaaccaggcctgcatttttttaaaagcaaaatttttcatatgataaatggcatacacacttgtaatggaacttgtcaacagaaaaaccgtggccaaaaaggtcagcggcagttcaaataagtcttttgcatgcaccatcgatgccggacccttgtctttcagcgccaggtaggttgcaaacaaggaagcaaaaaggaccgtctcgccgcctaaaaacagccaaaaaccgagaaatttattcctgccttcaagcgtcgcccgctccggggactcaggccatgttttcgccgtgaaattttgttctatttccattacgccccggcccccctttcttcgcgttccattaaggcttccttcttaatatggtaccccggatcatcttttaccgaccggatcagcatcgatgcaagggtaatcgccaagccgataacaaggatggtggtcccggttttggtgtgggttgcatggtacagcgcgccgaaagcggcaataaataggccgaatgccataaacaatggcaggatggacgggttcggcatatggatgtctttaatcggctctgccggtgtcacctgctttttcccttccattttttcgagccaccaggtgtcaattcccctgacaagcggtgtttgcgcaaagttgtactccggcggcggagaagaaatcgaccattcgagcgtcctgccaaactcccacggatcgtttccgactttccggttctggacggccgttacaacaatattggccacgaggataagcacacctgccgccatcagcaccgcgccgcatgaactgacgaggttatccgtatcccagccttgatccggcagatatgtccactgccttctcggcattccgagcaatccgagccagtgctggatcataaaggttaaatgaaaaccgatgaaaaacagccagaatgtgattttccccattgtctcattcagcatcgtgccgaacattttcggccagtaataatgcagtgccgaaagcagcccgaacacaacaccgccgacaatgacatagtggaagtgggctacaacaaaatagctgtcatgatattggtaatcagcaggtgcagccgcgagcatcaccccggtaaccccgcccaatgtaaaggaagggatgaaagcggccgcataaagcatcggcgttgtaaaccggatgctcccgccccacatcgtaagcagccagttgaaaattttaatgcccgtcggcaccgcaatggtcatcgtggagacagcaaaaatggcgttggctacgttgcccaggccggttgtaaacatatggtgggcccacaccataaagcctaaaaatccaattaaaattacggcgaataccatggaagagtatccgaataatcgctttttagaaaaatgtgcaaaaatttcggagaaaatgccaaatgccggcaaaatgagaatgtagacttccggatgcccgaaaatccagaaaagatgttcccaaatgatggtatttcccccgaaagccacgtcaaaaaacttcgcgccgaacatccggtcaaatgtcagcaaaaacaaaccgaccgtcagcggcggaaaagcaaacagaataagggcggacacaacgaaagtcgtccatgtgaacattggcaagcgcatatacgtcatccccggcgcccgcatgttcatgaccgtcacaaggaaattcaccccggcaatgagcgtaccgaaacctgaaatctgcagcccaagtgaataaaagtcaatcccgtgcccgctggatgcgagggacagtgaagcataagacgtccacccagcatcaggcgcgcccccgagaaaccaggataaattcaagaaaatgccgccaaagaaaaacagccagaaccccaatgcatttaaaaacggaaaagccacatcacgggcaccgatctgaagcgggacaatcgcattcataaaaccaaacaacagcggcatggccgcaaggaagatcatggtcgtgccgtgcatcgtcatgacttggttgtacgtatccgcgccgacaaaatgattgttcggcaccgccagctgaatgcggatcatcagcgcttcaatcccgccgatgacaaaaaagaatccccctgtaatcaaatacaaaatgccgatttttttatgatccactgttgtgagatattcatagacagtggcgccaaaacctgccttttttgttcctacgctcactttaacctcccctttgctttcgaatatccccttgttttattcaccagctttcagttgcatcagataagccgcaagcgcatcgatttgccggtcggaaagcttatccccgaaggcgggcatttttgtccccggtttgtattttcccggatcttttatccagtttttgagattggcctcatcacggtccaaaatgccggcgactttttccctttcgccaaaggttgccagattgggagctgtccgtgcctgttccgggcgtgtgtcattcggcgtgaccgcgtggcagctgatacagctttttttgaatacatcctgcccttcctgtgcgagagcggacgccggttttgtttcttttgcgtttttcatattgctgatccacgccttaaattcatcctgtgacaccgctttcactcggaagtccattaaggcatgggaagggccgcataattcggcgcattttccataaaacacatttccggcatcctctgccttcttatcatcaatttcaagccagaatttgttgatattatctgtgttggcatccattttcccgccaacggacggtatccaaaaggagtgtttcacatctgaggctttaacttggaagtagactttctggtttgtcgggacaacgagttcctggcttgtcaccacaccgtaacccgggtactcaaattcccaccaataaaggctggcgcgaactttaacgataagcgccccctgcttggcatcctttttcttatccatcgcttttgtatctccgaggctgaagacctggctgatggttggaatggcaattaaaatcaataaaacaatcggaataatggtccataagatttcaagcttatgattccccgctacctgttttggaatggattcgtccccttttttccgcctgaaccgtatgagaacggcaaggaaaacggcgaatacgacaaccatgacgaacaccataatccaaacgctccacatcatcaaatcatactgcttccgggccacttcaccggcaggatcaagcgccgacaaatatggcttgccgcagcccgaaagcgcggccataaacaaagtgacaataaaaagcaaactccccttttgtagccgctgtttcatcgctctaccaatcccctctttcctgtatctttctgtcagaacaaggatgcaatctattggatttcttttgcaagaaagaactccctttagaaaagcgtagcgatcaccattgctacaaacaagatcgttaaatagttcagcgaataaataaacatccatttcgcccattttaaatcatttttcattttaaaaccggacaggcttaatgccagccagcccagattaaacaatgtcgcaaggatgataaaaccaatgccgagcggtttcaggaaaaacggcaccggaataagcagcgccacccatataagcatatgccatttcgtgatttgaaaccctttgacaaccggaagcatcggaatgcccgctgcccggtattcttcgcattttttcatcgcaatcgcataaaaatgcggcggttgccagataaacataagcaaaaacagcatccacggcacaatcccgagatgcgggtcaacagccgcccagccgatcagtgggggaacagcgccggcgaaactgccgatcacggtattgctgacaagggttcgttttgaccacattgtatacagcacaacatagctgaatgcgccaaacaggccgatcagacccgccattggggtggtcaaaaacaatagcagcgtgccgaaagccacaaatccgaggccgattgcaagcactttcgcgtttgaaaatctgcccgtaaccgtcggcctgaaatttttgcttttcataatcgcatcaatatcctggtcataccagttgttcaggctgcacgacccggcgacaatcagtgcagttcccgccatcgcgaggaacataatgtccagcgactgcaaaaaatgcctgtttgtcagttccagcgcaagccacattccggtaaatgccgtaattaaatttgagtttacaattccaattttaatcaaggataaaaaatctttaaacgcagaggcgtctgcagctttcacccttgttgccgtattcatcgtccgactatctgccacgatagcccctccttccaattgttcaaaaccgttcaaaaaaaatgtccttacacgctgcctgcggattccctttgcaaatgtttttacgatgccaataaggaaaacggtatactacaactataatccatcttttcctttttggctattaatcaaaactgtatgtaacggtattgccctgctaagatcatttataagttttccagcatgcaaatatgtggaattccggaatatacctgcctacataatatttaatcataaattgccgcgaaggtgtgatattttcgacacatttttatggcaaatttgtgtcatgggaaataaatatttttccttcaggctgttttacgataagatgatagttggaagtaccttgccgaacggattttctactatatgaacggttgcaataatgcgggactgtatgttgcatttgcggctgctgatacatgtttacaaatgagattaaagaaggtggaacaattgcgcacaactttaaaatggctcggggtagtgacaactttatcgatgatggtggttttaattggcggggcacttgtcaccaataccggttcaagccttggctgcggccgccaatggccgctttgcaacggcaaaatttttcctgatccgctcactgtcgagtcgctgatcgagtggctgcacagattttgtacgggcatcgcatcgtttcttgtctttgcgcttgccatttggtcatggtttgcaatcggccataaaaaagaaacgaaatttttatccattatttccgtcatttttctgcttttgcaggcatttctcggcatggcggcagtcgtctggggttcatccgatcttgtgatggcgctccatttcggcgtctctctcatttcgtttgcgtccgtgctgatgctgactttgatggtatttgaatgggaccagaaatttgacgcaggcaggcttgtccttgaaaaaagcatgaaacggcatacgatcggcgtgaccgtttacagctttatcgtcgtctatacgggcgcgcttgtccgccatatgaacgcaagccttgtttgccgggatttcccattttgtgtgaacagcgacccttccctgcccggaaaccggtacgaatgggtgcagatgggccaccggacggcggcactcctcatctttgtctggattgcttatatcacctttagagccgtaagacattatcaaaaccagcttgtcatttactggggatggatcatttcgttcgtgcttgtctgcctgcaggctgcctcaggcgccatggtcgtttttacgaggatgaatcttactttcaccctcctgcacgcatttttcatttcctgcctgttcggcgtgttatgttatttgaaccttgttgtcgggagagtaaaacaatttgccaaaagcaaagacagccttccgctgaaaaaagcccgggtccgctgagttccgaaaaaacaatagtgccgcctgttgcggcctgaaaaataaaaaagctgtcctgttgcaaaacaaggcagaaaagggcttacgcaagataagcagaaaaggcgcaaggcataaaaccttgcgccttttcttttagcctctgctttatctctgccgcgcgcctgttttttttcgttacggccttgaatagacctgatacggcctccggtttgcatcatccgcttcctgcggcttttcctgtttgtgtttatacttttcctcatactttgtaaacatgcccacattaaccagaatgccgagtgaaagggacaaaatcagaagcgatgaaccgccgtagctgataaacggcaatgtcacccccgtaattggaatcaggccgcagacgccgcccagattgataaatgtttggatggcaatcatgccggaaattccgatggcaagcaggcttccgaactggtcttttgaatggatgccgatatatatgccgcgcagcacaaggtagcagagcccgccgattacaaacaagacgccaaaagccccgagttcttcggcaataatggccataataaaatcggtatggggctccggaagataaccgagtttttgaatgctttgcccgaggccctgccctttcagcccgcctgacccaatcgcaatataggagtttacgagctggaggccttccccgccttcgttctgaaacggatccaaatagcctgtaaaccgcgcgatcttaaccggcgtaaagattttatccttttccagaaaaagaaatggcgacagcaggacggcaaatgcaagcccgagccctgccagcttcagcatggttttcaggcgcatgccggatgcaatgatgatcgtgcagccaatcccgaaaataatggtcgccgtcccgatatccggctggatcgcaaccaggaaacaaacaacgataaggaagatcagcggcgggacaacccctttgttgaagatgtcaatgtatgcctgtttcttggcatacacggcggacaggtaaataataatcgcaaccttcacaaattccgatggctgcacggaactggaaccgagccggaaccagctttgcgcgttgttcgatgtatggccgaaaataaacagcgccaaaagcccgaacatcgacccgcacatcagcaatgcaaggaattttttgctcgcgtatagtttatacgggagaaaagccgtgacggtaaacgcaaggagagcaagggccaaattgattttctgcttgttgtaaaaataggcgctgtccatcccgtaacgctgcactgcaatcaccatgctggaactgtaaatcattaccaaaccgaataagcaaagaagcaggtagacaatgatgaccgagtagtcgaatgattttaagatttttttcagcatagaaaccttccaatccgtaaaaactgcaacattcttgataaaaaatattctaccgttttaaaaaaactcctgccgttatttttaaattataacatctttttcgccggccgccattgcctttgcctttttcaagcaataaaaaactcaaacaaccggaacatcgtttgagttttcaacatcatttttttatatatgcatcatgcaaaagggacagttcctgttcaagcgaatcaagaagccgctttccgtcaccggcatccactaagccgagccggaccgcaaaatctatttcacgggataaaccaaacatttgtgtatccaacacttcctcatataaagggcattggggcatcgttaagttatccatttgaacctgaattaattttaatatcttttctgcgtccgccttgagcaggctgtatgctttttcccggtggttcacctttgtttcagacgccaaattgatccccccgttcacatatcaatctaattaaaaattgtacctttaaaaccgtgattttgcaagttatacgaaatgcggagggcgcttgcccgtcggcgtatgaatttcatagtccccgaactgagattgagtgaaactgcaatcatcaaggccaaggccttgatgattgcaagttgaaccaatcggacatttacgggcagttgacccccgcttagccaattgtgccatattttcattatacttgtggaggggggcttactgcccgttaatgtgggataaaggaagcacggtgagccgcaggcgaaccgatgctgacttatcgtaggggaggggactggaaattcattagccgacagcgcccgcggctggacaaagaaatgcggagggcgcttgcccgtcggccgggctgtttttatacgctttcaagtgacacgggcagccgtaaaaggtataatgctgtatagacggacagaaaggggccacaatgatgattatgcaaataaagggaaaagtgaagtttccgattacacttgatgtcggcacttggatatttgatgaccggaaaatcgatcttgatacatatttcgacgaagaaaagcaggaaaccagccaggaagaagcctacttaaagaaaaccggcaaatattttgataaagccatggcagaaggggctgatccgcaggctgctgtaaggacaaagccaaagtttaaacggcaccatctaaaaaccgggacatttggcattccggtcggcctgttcatccaaaatgcggagccgctggaagatgcggaaaaaatcgtgtttgaaacaaagaacgggcctgtcgcttatccgcttgaaatggccggccatttaattgctgccttttcttttaaaggagaagcgctgaaagaagacggcccgcttcacattttattagatgacggttcaaaccgggaaaacccggtcaaatatgtaaccggtatccgcattgaataatcccggatgccgggggcagcgctaaaacatcctgaggcggctgctcccggttttttcatgcccttacaacaggtctgccgcgatttgcgcgagttttgagcgctcgccctttagcagcttcacatgtccggcaagcggcacatctttaaacttctcaacgacgtacgtcagcccgttattgtaagcatccaaatacggatggtcaatttgttccggatcccccattaacacgattttactctgctcccctacccttgttaaaatcgtctttacttcatgcttggataaattttgcgcctcatcaataatgatatattgccccgggatgctgcgcccgcggatataagttagcgcctctacctcaatcgaactcatgccggagagaatcccgtcaatttcccctgctttcttcgtattaaacaaaaactcaagattatcgtagatgggctgcatccacggccgcagcttttcctgcttttctcctggcaaatagccgatatctttgccaaacgggacaatcggccgcgcgaccaaaagctttttataatcatgtaaatcctccgtctgcatcaggcctgcagcaagggcaagcaatgttttgcccgttcccgctttcccggtcagggtgacaagcggaatatcagggcgcagcaaaagttccatcgccatccactgctgggcgtttctcggcttgattccccagacagcatcctgcacgttaaaaagtttcctcaccgtctttcccgcctggtccacaatgccaatggcggaagccgagctgccgagcgcatctttcaaaatcaaaaattggttcgggtagaacggatgattggcaatttcactcagcgccagttcctgcttttcataaaaccgtttcaataaatcggggccgatatacatttccatttgcccggtataaagatggtcgaggcttacgacacggtcgtttaaaaaatcctccgccaacaggccgagtgcgtccgccttcacccggacaagcgcatctttgctgacgagaattaccgggcggccattttcttttctctcttcttctagcgatagatttttcgcaaccgcgaggatccggttgtcatttgttttttccgcgaaaatatcctgcagctggtgaaatgagcggtgattcagctcaattctgagcacgccgccgttttcaagcgggattttctcatgcagttttccggctttccggaaaccgtccattaatttggatacctggcgcgcatttctgccgatttcgtccatatttcgttttttggaatccacttcttccagtacaacagccggtatgacaatttcattatcttcaaaagaaaagatggcatatggatcctggagcaatacattggtatccaagacgtatattttcttcaaatcgatgccccctgcttcacttggattatgttattttatgtgagcgcggtgtgacctgttcatacctgggattggacaaaggaccaagcactgctaaagtatatgtacgggcaagtccgattagaatcattgcgcgcgtccggggctttttgtgacgcaaaaaaaagcttccgggggccggaagcgtgctacattggaaaacgtccctttttttcagtttttttatgctggtacaggcggattttgtaaacgccaagcacaacagccgctaaacagagtgattcccctacaggcaaaaagattgcaaaaaacgtgagcagcgtgcatcccataaggagcagcacataaatgacagcagatttcagagccggcaattttctcgcaaatccgagccggtagacaatgaccgagagaacgacgatggtgagatacaagagccacatccccggttccgggttttcatccactttgtacaatgccgcaaaaaatgacaattggtggtgaaccgcctcgcttgtcatcctatctccccttttcccctttgaatagatgaaagaacagggtcatgccggccctattctttgtttatgcattttctgctgcttttgcccgtttctgcgctttttcgcgctcgctcttattcaggatttttttgcgcagccggatcgattccggcgtcacttcgcaatattcgtcatcgttcaggtattcgagcgcctgttccagcgacatgatacgcggctttttgatgaccgccgtctgatcttttgttgccgagcggacgtttgtcgcgtgttttgctttcgtaatattgacggcaatatcattttcacgggagttttccccgacgatcatgccttcataaatgtccgtgcccggctcaacaaacagcgtgccgcggtcttccacctgcatcatgccgtatgtcgtggctttgcccgtttccatggagacgagaacgccgtttctgcggccgccgacgcgtcctggctgcatcggctggtaggaatcaaacgtatggtttaaaatgccgtagcctcttgtgagcgtcataaattcggtcgtatagccgatcaatccgcgggccgggacattgaaaatcaggcggacttgtccattgccgttattgatcatatcgagcatttcgcctttccgagaaccgagcgactcaataatcgaaccggtatattcttccggcgtatcgatttggacgcgttccaccggttcgcatttgacgccgtcgatttctttaatgatcactttcggctttgaaacctgcagttcaaacccttcgcggcgcatattttcaattaaaatggataaatgcagttccccccgcccggacacaacccatgcatccggagagtcagtgttttcaacgcgcaagctgacatccgtctgcagctgcgaacggagccgttcttcaattttccgcgccgtcacaaattttccttcacggccggcaaacgggctgttattgacgaggaaagtcatttgcaaagtcggctcatcaatgcggagcggcgtcagcgcttcctggtgttcaaccgggcagaccgtttccccgacattgatgtcttccattccggacaccgcaatcaaatccccggcatatgcttcctcgatttcttcccgtttcagcccgaagaaaccgaacattttggtgacacggaactgcttgacgctgccgtccagcttcatcaatgccacctgctggccgacatgcattttcccgcggaaaacgcggccgatgccgatccgcccgacataatcgttgtaatcaagcagcgcaacctggaactggagcggttcttcgcggttgtcgacaggcgccggaatatgttcgataatcgtatcaaacagcaccttcatatttccttcctgtttggccggatccggatcgaggcttgccgtaccgttgatggcggaagcatacacaactggaaattccagctgttcatcattggcatccagttcaataaataattcaagcacttcatcgaccacttcttcagggcgtgcaaaatcgcggtcaattttgtttacgaccacaatcggcgtcaggttttgttccagcgcttttttcagcacgaaacgcgtctgcggcatacagccttcataggcatccaccacaagcaagaccccgtccaccattttcataatccgttcgacttcgccgccaaagtcggcatgtcccggagtatccaaaatattgattttcttatctttataatgaactgccgtgtttttggcaagaatcgtaatgcctctttcccgttccagatcattggagtccattgcacgttcttcaacatgctcattggcacggaaagtaccggactgcttcagcagctggtccacaagcgtcgtcttcccatggtctacgtgcgcgataatggcaatgttgcgtaaatcttctcttcttttcaaaaacatttcctcctgcctaaacgcaaatctatgttagtctatacctttaactaaaatattataacacaatgctggctttattaaaacattttcggtaaaataaggggaaagggaggttcaccgtatgcgggaaatcaaatgggtatttgtgttcttttcactggccgcattcctttcgatgtgcggcatcggcgttgcgatcggcgcccaaagcgttgccgggattctcggctgcaccgcgcttctcattgccattatggggttcggctttaaaacaaagaaaaaaatgcgtgaagaggggaaactgtgagcccctcttttcttattcccacccttttaaataccgcttcaaaatttcctcatgcagcccgggcctgccggcaaacacagaactgtttccgagcatatcgagcgggcgcccgtaaacgtccgtcacaacgccgcccacttcttccacgatcactttcccggcggcaaaatcccaaggtgacaagcgcatcgtaatataagcatcaagccttcccattgctacataagcaagctccagcgctgccgacccgtaactccttgtgccgcgcacatccctgaccagcgccgccagacgggccgggtcgatacccctgttttccaccatacaatacgggttcagtgcaaggatcgtatcctcgagcctgttttgcgcaagcagcggaatccgttccccgttgaaataagcccccttgcccttttctgcaaaatacatttctttccggacgacatcataaatatagcctagtttgccttctccgttctcgtagaccccaattgaaatcatgaaattgactttttggtggacaaaattgaccgtcccgtcaatcggatccacaatccagacgatgccttccatattccggatgtcttcgccgaagccttcttcacccaaaatgtggtgatccgggaagattgtccggattttgccgattaaaaattgttctgtttccttatcaatattggtcaccagatcattgcggtccgattttgtttcaatttgcagcggtttttgcgaagcaagaatccgctcgcccgcttccctgatccaccggacggcatatgtattgatttcttcccatctgtccatagccggaccctccatctttccaaatcatttcccttaagcgtaaaggaaatgaagataattatcaagttttgggaacgcattcggcatcgttttccggcagcgggttttgcctgcaaacatggacctctgctgcacaaaaacgaacccccatctgtccgatacagggagtccgctttttacgacatcctgcctttttgttttccattacatggctttcattttcagcagttcttcacggattttttccagacgcttaatcgactgtcctttttgctcttcatctttcatttccatcgcttcatacaacgtagccagttcgtaatccagttccatgcgcaagactgcaatccgttttctttcataaggttttcttttcaccgaagggattacctgtttcatttttcttcacatcctcctggggtaatgatatgaattttctgatattatctttatatatattatgttcaatcatcactgatgtaacaaaattgtgtgtatacctatttttaccctccggcttttatttgttaaacctcccttatggatgataaaatatgaatatccatccccatggttcatacagaacggaggtgaacaaatgggcatcaccgcttttaccggacaggattttgacgttttccggattgagggcctcgaccagcggatggaacagctgaaatcaaccgtccgcccgaaacttgaaacattgggggaatacttttcgccggttttgtcggttttgaccggtgaagaaatattttatcatgttgccaaacacgcccgccgtaccgtcaatccgccgaaagatacgtgggtggctttttcccccggcaagcgcggctacaaaatgcttccccattttcaaattgggctgtgggaagaccggctcttcatcgtcacggccatcatgaatgagtgcccgcaaaaagcgtccatcggaaaaaaactcgaaaagaaaattgatccgattttagaaaatatgcctggccattacatttggtcggatgatcatacaaaaccgggcggcatccgcactgaccgtatgaatcaccatacgctaaaggagtttttcagacggatgcaggttgtaaaaaaagccgaattgctttgcgggctggatatcccgcgggaagaagcagccggcatgtccccggatgaactggccaaaacgatcgaggacgtctttgtacatgtattacccatctacaaaatggcctaaacagaacgcggaagggaaaaagcgcgccggaacacggcgcgctttttctcctgtgccaagtcgtatttgcaggcaacttaaaagcagcatcggcgggtgatgctgctttctttccgtgccgctaaccgcgcgatccggtttcatgcattttaatgaccgggccctgttcttccttcattttcttgacggcccggtacggggagtagccgctcgcttcttcaaattcattgcatatattccgctcatcggctttcccggggacgatttctttaaaacggcggtacctggcaagcagcacgtcccggttgacccctttttcatatgcttcttccaccgcttcgaaaaattggacggcatcgatgacttcctgtgtcgaccagtcagctgaaatcggatatggatattccatccaaaccacctcgcttttcttcagtatacccgttctattttacctgaatcgcttccgcccgggcaatcatgccgcaatccgccggaatacaagggggctgctatccgttttaaagaacggtttgcccacggctttcttccgcctgtacactcaccgtctagcttcccctcatttctccatgctttatgcgctttatctttttccatcgcccgcttccggcttgttttttccctgtgcaaagaaaaactatttaaaaaccgcggctggaatgctataatccatcttgtttttcttcaaaagccagtaatgagataaagaggtggaatgattgtcacagtatcacacgccattatacaccgggctactccggcatattgaacgaaatcccgtccaattccatattcccggccataaaaccgggcgcgggatggatcctgattttcgcaaattcatcggcgacaatgtattaaaactggatttaattaatatcgagccgctcgatgatcttcaccagccccacggcatgatcgaggaggcgcagaagcttgccgcggaagcattcggggcggatgctacgtttttttccgtacaagggacgagcggcgcaattatggccatggtgatgagcgtctgcgggccgggcgataaaatcatcgtgccgcgcaatgtccataaatcggtgatgtctgcgattgtgttttccggcgccgtgcccgtttttatccacccggaagtggatcaggtgcttggcatttcacacggcattacaccggcatccgtttccaaagcgctcaagcaacatcccgatgcaaaagccgtcctggtcattaatccgacctattacggcatttccgctgatttgaaaagtattgtggatatatcccatgcctatcatgtcccggtgctggtggacgaggcacacggcgtccatattcattttgacgatgaactgccggtttccgccatgcaggccggcgcggatatggccgcaacgagcgtccacaagcttggcggatcgctgacacaaagttcgatcttgaatctgaaagaagggcttgtatcgaagaaacgtgttcaaagcattttcagcatgctgacgaccacgtccacttcctacattttactggcttcgctcgatgtcgcccgaaaaaggattgcaacagagggaagcacgatcatcaaggaaacaacccgccttgcgcaaaaaacacgggagcgtataaacgaaatcgatcatttatattgcgccggaagcgagattctccaaacgaaagcgacttatgattacgatccggcgaagctgatcatctctgtaaaagatttggggatcaccggccacgatgcggaaaaatggctgcgtgaaacctaccatatagaagtggaactctctgatttgtataatattctttgcattgtgacgcccggggatacagaaacggaactggatttgctcgttgaggctttacacagcttgtccgaaaccttctcgcatttgtccggcaaagtgggggtgaaagtgatgcttcccgaaatcccatcgcttgccctctcgccgcgtgatgccttttatgccgagacggaatccgttccgctttccagttctgccggcaggattattgccgagtttgtcatggtctatccgccgggcattccgatttttatcccgggggaaatcattacggaagaaaacattgcctatatccggaaaaacatcgaagccggccttcccgtacaggggcctgaagacgaaacattgcaaacgatccgcgtcattaaagaacatcatgccattcaataagtttgaaaaagcaggcggggcctccccgcctgcttttttatcccataacgcaaaaaaaaagccgggcaacaagccggctgagagaaaatggacgcatgcattgaaaaatcaagtgctacacttcaggactattcttcttcgtgtttacattggtcacacgttgagtaaagcacggatactttttcttcctcaacgtggtcaatcatggcatcgcatgattggcaaacaatgattcccatccgattttcctcccctttgcgagttttgtaaccgcttgtaacattataatatgtcatactggagaaaaaatcaaggattttgtataacataatttaaattgtgttatacaattgaaagtgggggtcattttgtggttgttttagaaaatcagttttgaaaaagacatttccgcaagcccgtatgcagcgagactcaacaccgttactacagatgcagcccggagcgaatgcacaattgattttgccagagcaaaggcaatgaataaaaagataatgaacagggcggcggtaaaaatagccggatcgtgtccggatagccacgctgccagtttaaaaccgctccatatcatgatctggaataaaaatgccaccgtacatttcattgtcccacctgcacctttcattataattcaaaatatgcacgcggtttcgccgttataaccctgcctgccagcgcggaaaaaatctgtcccatatgcagctgttactgttatagccttaaagcggcgcctttaaacggaaaaaggcttcacgccggggcagccttcccggtgtgaagcctttgaatcattattttaaaatatggactggggtgccgagtgccgcttcggccgcttccatcgtaatttcccctaatgtcgggtgggcatggatcgtcagcgcgatatcttccgctgtcatgcccgcctcgattgcgaggccgatttccgaaataatatcggaagcgctgatcccgacgatttggccaccaatcaacagcccgtcctctttgcgtgtaatcagtttgacgaaaccttcgccggcttcaagggcaagtgcccgcccgttcgcaccgtacggaaatttgccgactgcataatcaatgccctcttcttttgcctgctgttctgtatagccgaccgttgccagttccggatcagaaaagacaatgaccggaatgccgaggtaatccacttcggccggctgcccggaaatggcttcggccgcaatcttcccttcataggaggctttgtgggcaagctgcgggcccgggacaatatcaccgatggcataaatattcggcacgcttgtccggcactgtttatccacttcgataatgcctctgtctgtcatctttaaattcaactgttcaaggccgagttcatctgtgtttggacggcgcccgaccgtaaccagcacataatcgccttccactttttgttcctggccttttgcttcatacgtgacaactacgccgttttccttctcttccacgccttttgccatcgcttccgtgataatttcgacaccccgtttttttagcttgcggacaacgagggaggtcatttgtttttcaaacgcgccgccgataatgtcttttgccccttccaaaatcgttactttcgccccgaattttgcataggctgtcccgagttccattccgatgacgccgccgccgataatgacgagtttttccggaatttccttcaaactcagcgcgccggttgaatcaatgacgcgttctgaaaatttgaaggaagggatttcaatcggtcgcgaaccggttgcgagaatcgcatttttaaacgtataggtttgcgctgatttctcgtccattacacgaagcgtatggtcatcgacaaaataggcttccccgcggacgatgtcaattttgttgccttttaacaggctttctacgcctccggtcagttttttcacgacgccggatttccattcctgcactttcccaaaatcaatttttgcattttcaacggcaatgccgagcgcctcggattccgttgcgtattcatagcggtgcgccgccgaaatgagcgcttttgaaggaatgcatcctacatttaagcaaaccccgccgataaactgcttttcaacgatcgtcactttttggccgagctgggctgcccggatggccgcgacatatccgccaggccctgcgccgattacaattgtgtcggtttcaattggaaaatctcctacaaccatcagattacgcctccattaataaaagttctggatcatgcaacaaacgtttgatatgatttaacgcattttgtgcggtggcaccatcgatgatacggtggtcaaaactgagcgacaacgccagtacaggcgctgcaacaatttcaccgtttttaacgaccggcttttctgcaatccggccgattcctaaaatagccacttccggacggttgataaccggtgtaaaccattgcccgccggcggaaccgatattggaaatcgtaatggaagcgcctttcatttcgttcggggcaagctttccatctcttgctttttcagccagttcattaatttctttggaaaccgcaaataccggtttgcggtcggcgtgtttgacgaccggcacaagcaagccgcgctccgtatcagcggcaatcccgatattgtaataatgcttatggatgatttcattcgtttcatcatcaatcgaactatttaaaaccgggtattcccgcagcgtgctgacgagcgcttttacgacatatggcaggaaagtcagtttgatgcctttttctgccgcgatctctttgaattttttccggtgcgcgaccagtgccgtcacatcgacatcatccatcagcgtaacatgcggcgcggtttgtttcgagttgaccatcgcttttgcaatcgctttgcggatgccgctcatcggttcgcgtgtttcagggaattccccttcaggcacagcatcttgggaatcaggcgcctgtgcttcggttttgccggcttccgtttccgtctgctgtggcccgttcacatacgcatcgatatcttcgcggagcacgcggccgttttttccggttccggacacaagccggatatcgacgcctttttcacgggcatatttccgcacggatggcatcgcgatcacgcggcgatccgcggattcggatccgtgttctgcttctttttcagcaggcttggcagtttcagctgtttcctgttttgccggttccggttttgcactttctgctgcttcttctttctgatcgtgcccatggtcccctttaaattgaagattttcatatccgggcgcatcgaattttacaaggacatcaccgacaactgcgacgcttccttcgtcaataagaatttcttcaacggtcccttccacaggggacggaatttcgacaaccgatttgtcattttgcacttcacagagcacgtcgtcttccgaaactttatcgcccggtttaataaaccattttacaatttcgccttcatggatcccttcgccgatatccggcagcctgaattcaaatgacaaggtgttcacgctccttttttcaaaatgcgccccattcaaggtgcagcaaaaactcgattggaatgtatcccggttcagcgcgccgccataaccctcttacttacggcaaaaaccggtttagaatgtcaatgcctcttttgctttttccaaaatatctttataggtcggaatccaaacgccttccgcctgcgagaacggataaacggtatccggggccgttacacgcaataccggcgcttccaggctaaaaatcgcgcgttcgttgatttccgcaacaacgtttgccgcaacgccggcctggcgctgtgcttcctggacgacaatggcgcggtttgttttttccacagacgccacaatcgtttccacatcaagcgggctgactgtgcggagatcaaccacttctgcggagtatccttcttttccaagttcatccgctgctttcaatgattcatggaccattgcgccgtaagcgataatcgaaatatcttttccttcccgttttacatctgcttttccgagcggaatcgtatattcttcttccggcacttcttcccggaaagaacggtacagtttcatatgttcgaggaaaacgaccgggtcattgtcccggatcgcggagatcagcagccctttcgcatcataaggcgtggacggaatcacaactttgatgcccggtgtttgcgccatgagtccttcgaggctgtccgcatgcatttccggcgtatgcacgcccccgccgaaaggagcgcgtattgtaatcggcattttcaaatccccgccggtgcggaaccggtatctcgccatctggccgtggattgaatccatggtttcaaaaacaaaaccgaaaaactggatttcaggaaccggccggaaaccctggagcgcaagcccgatggcaagcccgttgatgccggattcggcgagcggcgtatcaaagacgcggtctttgccgaactctttttgcagcccttccgttgcccggaagacgccgccgtttacgccgacatcttcaccgaataccaaaacattttcatcattttttaactcggtcctgagcgcatccgtaattgcctgtatcatcgttaattgggccatggcttatttcgactcctttgcttggtaaaattcgtattgttcctttaaggtttgcggaagttcttcgtacatcacggagatcagatccgtcactttctgtttcggcgcgctatccgctttcttaatggcagctttaatatcttctttcgcctgttcgattgttccattttcctgctcttcgctccacaggtttttctgttccagaaacttgcgaaaacggacaagtggatcttttctcgcccattcattgtcaaggtcttccgtacggtaacgtgtcgggtcgtccccgctcattgtatgcgggccgaaacggtagcagatcgtttcaatcagggaaggcccttcgccagcgagagcgcgttcgcgtgcgcgttttaccgccgcatatacactaagcgggtccataccgtccaccacaattcccgggatgcctgcagccaccgctttttgcgccagtgttttggccgcggtttgcacggagcgcggcgttgaaatcgcgaactggttgttttggacaataaaaacagccggggctttaaaggcgcccgcaaagttgatgccttcgtaaaagtccccttgtgaactgccgccgtcccctgtatacgtcactgcaacggcctttttgccgcgttttttaatgccgagcgcaacgccggcagtctgcacatactgggcgccgataatgatttgcggcgggaggatgttcaatttttcaatgcctttcatcccgtccacatgcccgcgcgaccataaaaatgcctgttcaagcggaaggccatgccaaatcagctgcggcacatcgcggtatcccgggagaatgaagtcctctttttcaagtgcaaaatgggaagcaatctgggaagcttcctggccggcagtcggtgcgtaaaacccgaggcggccctggcggttcagggagatggaccgctgatcaagaatgcgggtatataccattctccgcatcatttcctgaagctgttcatccgttaaatcaggcatgagggaatcgtttacaattttcccttcttcatttaaaatttggactgtttcaaatctttcttcaatgtcatgaagcgtctttacttcatcaaactttgtgcgtgaagccatcccgttcaccaatcctttctttatccgcatatatgaagatacaatttcgccgattttaaaaaatgtgtgtttacagcagaaaccgacaattccttcaagtaaccgcaatcatttttgacctgccaaaaatgcgctgtatcaatgaaaaagcggaagtgactaatacaacactatattcaacatatatagagtacatgaaaaataaaaaagcgtcaattataaacgctttttctatccaatatttttctaatataccgaatcattctgtttggaaaaactgtatcaatgtgtatttaaatctgtactataaaagcggaaacgttgctggagaaggttttcaggaaaaccggttccgccgggcccgggcgttgttgcaaacgctgccattttttgcggcaatttttcccggcctgccggaaattgtcatattttggcgtgacgcttccgccttttccctacatataataaaggacaagaatgagccgcacgcctttacaatatccaaattaatattacaatagaagtagggagttgatccacaatgttaaaaaagctgaggaagaagcttttaaaacagtggaaagatatgctgcgcaaaaagttaatcgcctgaacttttgaatccctcttttccaggagggattattcttttctttatgaaaaaaggccatgaaaaagttgtgatatgcgccatgatttatatataatagaaaaagttacaattgaaaacggagcaaggagagattaatcatgatttacaaagtgtattaccaggaaaatcctgaagaaattcctgtccgggaaaacacgaagacgttctatattgaagccggatcggaaagggaagtacgccaaaagttgaaagaccgccgaatcaacattgaatacatccagctgcttgagggaaaatatcttgaatacgaaaagcagcaggataattttaaattaacggagtaactgtatgaaatttgttaaaaatgaccagacagcggttttcgctctcggcggattgggcgaaatcggaaaaaacacttatggcgtacaatttcaagatgaaatgattttaattgatgcaggcatcaaatttcccgaagatgaactgctcggaatcgactatgtcatcccggattacacctacctcgtgaaaaacgcggacaaaatcaagggcctgtttatcacgcacgggcatgaagaccatatcggcggcattccgtatttgctgcgccagatcaatgtcccgatttacggcggtaagcttgcactcggccttattcggaacaagctggaagagcacggccttctccggcagacaaagctgattgaaatcaaagaagacgatgtgattaaattccggaaaacatctgtcgcatttttccggacgacacacagcatcccggattcttacggcattgtcgtcaaaacgccgccgggtaatatcgtgcacactggcgacttcaagtttgactttacaccggtgggcgagccggctaacttaacgaaaatggccgaaatcggaaaagaaggcgtgctttgccttttgtccgacagcacgaacagcgaagtgccgcattttacgatgtcagaacggcgtgttggggaaagcatccaggatattttccgaaaagtggacgggcggattatttttgccacgtttgcctccaatattcaccgccttcagcaggtgacggaagcggctgttctggcagggcggaaaattgccgtgttcgggcgcagcatggaagcggcgattgaaattggccatgatctgggctatattcgcgccccgaaagatacgtttattgacacacagcaattgaaccgcctgccggccaaccgggtgaccattctttgcaccggcacccagggcgaaccgatggcggcgctgtccagaattgcaaacggcacgcaccggcagatccagatccagcccggcgataccgtcgtcttttcttcctccccgattccgggcaatacgacgagcatcaaccggacgattaatttgctgtaccgcgccggcgccgacgttatcagcggctcgctgaacaatgtgcacacatcaggccatggcgggcaggaagaacagaagctgatgctgcggctgatcaaaccgaagtattttatgccgatccacggggaataccggatgctcaggacgcatgccaagcttgccattgactgcgacgtcccggaagaaaactgctttatcatggataatggcgaagtgctggcgctcggccatgacaccgcagaaattgccggcaaaatcccgtccggctctgtctatatcgatgggagcggcatcggcgatatcggcaatatcgttttgcgcgaccgccgcatcctctctgaagaagggctcgtcattgtcgttgtggctatcaatatgaacgagtttaaaattgcatccggccctgatattatttcaaggggctttgtgtacatgcgtgaatccggcgatttgatcaacgaagcgcaaacaatcatcacaaagcacttgaataaagtaatggaacgaaaaacgacgcaatgggcagaaatcaaaaacgaaataacagatacgctggcgccgtttttatacgaaaaaacgaaacgccggccgatgattatgccgattattatggaagtttaaaaaaggggcattctgctaggaagccgccagaaagtccaaacgaaaacaaaaaacggcggggcaccaccattcagcgtgtcccgctgtttttttgcatctttaaaacacactttttcagcgcctccgttatcggggtgcttttttgtatgcctgtttgaaaggcccggcattttgcaggggaaaatgcttcccgaattttttcctcccgcctgaaaagaattttttatttttttgcaaaaaggactgtacaaaacaaattttagggtatatactgtattataacagaaagataaatgatttgttgttataaaacatacttttttgccgcgacagcccgggcccggcattgcggcatcatcgatggttttataacagccgatatgattccaaacacgaaaaaggagatggatgaaaaatgatgatgagcccagttgaatttttcaaaacattgcctgcgaaacaatgccctgaatgcggccagccgattgaagaacaagcagaatcgtacatgctggaatgcgaccattgcctttccaaaaaagaggaatagcgccgcaaaaaaaagaaggggtgccccccttcttttttactgcaacgataaaatataggataccatcaaatcggcagcggtcctgagcgcacgttcatccggcgcaaatttggcatgatgcagcccgtatggagacccgaccccgagccagaacataaagccggggatttctttcagcatatagccgaaatcctcccctgtcaaagcttccctgcattcatgcaggtgcgctccgccgtagcttcggacaaaatccataaagcgggcggtctcttccggatgattgaacacctggtaataattgcagccgtaatcaatttccgcccggcactcaaaaccagccgaaagcccgcttgtgattgcttcaatcctgtgcttcactttttccatggcttcgcttgataacgtgcggatcgtcccttcaaggcgcgcatgttccgcgattgcattttgaaccgtgccgccagtgattttcccgatggtcaccactgcgctgtcgagcgggtcgatattgcgtgagataatggactggagctgggtcaccagatgggccgccgccaccaccatatcctttgtatgctgcggataggccgcatgcccgccctttccttccaggtcaatatacagttcggatgtattggcaaacagcagccccttttttaccgctaccgtgccggccgggtattccggcgcaacatgaagcgccatcacaaggtccggccgccattcattgcgcagcacttcttctagcatcgcttccgcccctccaggcccttcctctgccggctgaaaaataaagatcagatcatccttaacgggccggcttgcaaaatgcgataaaatcccgagtgcgatcgccatatgaaaatcgtggccacacgcatgcatgtttccttcgtgttccgattgaaacgggaagcctgtctcttctttgatcggcaggccgtctatatccgtccggtaaccgatcttttttttggggcgggtcccctttacttttacaagcaccccggttttccatgttttcacttcaagatggcctttcggcaaacgcgaaataaaatcaaggatgtaccgctgtgttttatgctcctgatatccgagctcgggaatccgatgcagatcccgcctgatggcaatcaaattcgtttccatatccagcccttcctttccggtatggcaaaaaaggccgggcaccgttttttggcacccgtccttccggcttacaaatttctaagatctttcatgatttcggttttggattttgttttttcgtcaatttctttgatcacttttgccggaatgcctgcaacaacggtatgcggtggcacatcttgcgtgacgaccgcaccggctgccacaaccgccccttttccgacgcgtacgccttccaggatcacagcattcgctccgattaatacatcatcctcaatgacaaccggatttgcagaaggcggttcaatgaccccggcaagcacggcgccggctccgatatggcagttcttcccgactgttgcccggccgcctaaaacggcgttcatgtcgatcatcgtgccttctccaataacggcaccaatattgatcacggcccccatcataatgacggcattattgccgatttcaacacggtcacggatcgtgacgccaggttcaatacgggcgttgattccttttaaatcgagaagcggaatggccgagttgcggcggtcattttccacgacataatccgcgattttgccacggtttgcttccagcacggccgaaatctcttcccattcgccaaagatgacagccatgccgccgcctgcgaaaacgcgggctgactcaccgaaatcaaggccatcgacatttcccttcacatatacttttacaggtgttgattttttgctgtttgctatgaatgaaatgatctcatttgcatccatcatgtccatatgtatgcctcctgacagctgattcgccgataaatgtgatagtttgcgcatatgttcattttaaaggatatggggctgtgccgcaataaattcacgcaccacttttacaaaagcgcggacctgcttcaattgaaacgcggcgtcataaccgaggagccatgtgtcgcgtttcagcggctccccgccttcccctttgagcggaattttgtgcagatggcggatttccgccccgtccagcgtgatcgcaggcaaaatcgcataaccgatgccgttaaaaaccatttgcttgcacgtttcgatctggtccactacgattgtttgtttcggggaagtttgaaactcgcggtgccaccagtccatcatttcctgataataatttgaatcgcttttaaactggataaacggccggtcggcagccggcagcttttcaagggtgtcaatttcctggtccacgagaaagagctggtcttcaaacaaatggattttcgtgcttttccattcattcaaaccgcggacaatgccgatatggacttcatcttcgtaaatggaccgcaaaatttcactgctccagcccgtgacaagcgagatttttgcatccggatatttttcaacgaatgttttcagcactttcggcagccagttttggccgacgatcgtggcgcaggcgatttttaatgtcccgtgcacttttgagtcgagcgtgcggatggcttcccgcacattttcttccttttcgagcatttcattggcgagctggatgaccagttccccctcaggcgttatgatcaaccctttttgcgtgcggagaaacaattgcgccccccactgcctttcaaccgactgcagcctttgcgacaaggccggctgcgatacaaacaggcgttcagctgccttccgcatatttaactcctgtgctaaaacagacagtaactggcactccgaaaaattcatgttaaccccaatccgttttctttggtttatggaaaaacggaccgcgcagccatttgcgcggtgccgccgctaaaaatgattcaatttatgaatatgatggttcaattctttcagaagcgagcgccttgtaaaaatgccagcaaaaaatccttcatcgtcttcgacacataaaaaattgtggtcaacaagccaacgcaacgctttttcaaaattgtcatgcacatttagccgcggaatgtccgccttcatgacctgttccaccttaatctcgcccagtttttcaaattcaatccgttccagccccaaaatggaatcggtgatcatcgcggaactgatcaggccgtgcagccggtagctggcgtccaaaaccggaacagcggcatacccgcttttcgtcagcacgagcaaagcatgttccaggctgtttccaacctgcacatgggccactttttcagacgggatcataaaatccatgattttcggttcaagaaattcctggctctgcaatgaaatcatcttgcaaaaatctccttttcttccgtattttcaggtacaaaaccttcaagaggagatgcttatttcgtttgccgttgatgcatgatgaatcactactattttatcataaacagggcttgattgacgaaagaaaaacgcccggctttatgccgagcgaaaaaattttttaactatcagagccttcctggacgatatcaaaaatttcgatggcggcaatatccaggtcgtcaaactggtacttgctggcgtgtttctgcccgtcgaatacttccagttcaaacgttccggtttgtggaaaaaatttcacctggcagagcgccttgccgttcacttcaaaacgccgttgctggacttcccctgtatcttttgcttcctgcatcgcctgcagcctttggataatacctaataattgagacataatggactcctttcgacgaacgtgagtgccggttttgaataacggcattcacccttttattcacacaaatgataacctgtcccattcgaattttacagtaaaaccttcgcttagaaaagggagcggcggcaaattttttcattttgtgccgtttctgtccttattttatccgaaatcggggaagaccttgtaccattttttcgatttgtcccgcagaaaaaccccctgctttaaaagaagccgctgaaaaggccaaaagaaaacataaaaacggcgagacaccgccatttagtgccttaccgtttcttgaatacttttccagtgccctgcatttaaagcagcgggcccggcgcgaacaaatcgggcaaaacagctttcggcacggctattctgaccgtcacaagcggatttacaatctggctgatttcaagggagcatgtggcgctcaaaagcctgtaggcatcattaaacccgagcccgaatgcagcccggaacctgtttgcagccgcccgcatcccttttttcgccgccgcttccagggtttctgccgatgaaatcaaaaaccatgtctggctggtttcaacggccggcatgccgatggcgggagcgccggccagtttcgtgcattgcagggtgactttaccgccaatttccacgcctgaaccatccagttccccgtcccccattgcggcgtgaagatcgccgagcgcaagcagggcgccgtcatggaaaacggggaggtacaatttcgaccccgccgtgatccatctcgtatccatattgccgccatggtctccgggtatttcacaaagcactgcgcctttttccggggcaacgccgatgacgccgatcatcggggcagccggaaagtgaaggcggctgttaaactggatgttaccgtcctttacgcggatgatgcgcgtatcggtttcttttacctcttcgccgagtgcccccatcccggggtaaagcaccatgacaccggcttcatccagctcaatattttgaatgtcgacacaaaggatgtcgccttttttcacgccttcgatctcaatcgggccggtcgccgggtttataaatggaatgtccacttccgtcctgagctggctttccgaggtgatttttccgccgtagcaatcaaacgtctccacggcaaacgtttcgtccagccggactttgtaagccggcttgttttccgctgaaaaatgggtaataaaatgttctttttttagttgctgcataatccgctcctttcgcggccgtttaaaaaggatgctgattcagccactggccgccgtccattgtaaccacttctccattgatatatgcggcatggggcgaaaacaggaaaaaagcaagttcggcaatttcttccggcgttccgagccgcccgagcgggacactgtttaatgtcctttgggccgcttcttccgattcccacagcttgcccgccccgcctgttctttcaatcgggccgggcgcgatcgcattcacgcggatgccgtatttttttccccattccaccgcaagcgtacgtgttaaggataacacacccgcttttgccgctgctgaatgggcaacgccagctcctgccccccaggcataagtcgcgaccatattgaggatgctccctttgatctttttttctatccagtagtttccaactgcccgggaacaatagaatgtcccgtttaaaacaatattgatgaccgcattccagccgtttaccgataatttttccgccgggcagataaagtttccggcggcattgttgacaagaaaatcaatgtgcccgaattttttgtctgtctcttccaccattctctctacatcttccggcttccggacgtccatttgcaccgtgaagatatcggaatggtaacggagcaattccgcttttgtagcccttaatttttcttcatctcttcctgtaatgacaacttttgcttccgactgcgcaaatttagccgccattgccttccccattccgcttgaaccgcctgttacgatgacaactttttctttcattaaccttctcccctttcatgaatgatcagccattcattttatataaaaaaattcaacggcttcggcaaactgccagataccgtcgcaaactatcccggcgccccggccaaggtgcttccaaggcgtatgaacctaagaatctttttttaattttaataaggactcatgcagcttcgttaatgcccggatgatcgttttcttgcggttatagccttttaccacaaccgtcaggccgttatattccgcaaacacctgcccccaggcactgtcacgcaaaaatccgaaaacgtaaattttaatatatccagcctcagccgggataaaaatcatgtccattctttcgctcattttgaacgctccttccgtgtccaaaaatgcggcccggattccggctggcaccgaaaacgatagaaagagccgtcttggtgaagtacttttttctataccataccatacaatgtaccattagtcagggaaaaagaaaatacgttttgacaatttaacggacggattttacacaaacagctgcttttccacttcttcggcgaggacaggccggctgaagaaatatccttgcgctttctggcagcgggccgattgcaaaaacttcacctgcccttgttcctccaccccttccgcgacgacttcaagcccgagctggtgggcgagatggatgatcgttcttgtaatggccgcgtctttttggctgttttccagttcccggacaaaagactggtcaatttttaaacgtcggcccattttccactttcaaaacactgaccgtctcggaaagcttggaaagaaaatcccggctgaaaaaaatatcaattggcagttcctggagtttctttgtttgttcttcagctttcgaattgtccataatatcatcctttttctcatcaagaaaatgcttgctgatgctgaaaattcaggtaaaaagtatatttctattttacagggaaatgtacgaaaagcatagttgaaatacaaaaaaacggggcggaaagtgcgggcgggaaatccgggcccgttcctttccgcctggccggccatccatttgccgggtcccgcagccgttcgcttgcctttcatgctcttcattaccggaagtgatccgcccatccgcccctttttactcctgatttgcgataaagggccaccaatttgccttgccaagcatttttacaagcaccggcacaaacaaaggcagcatgatcaaagcataaaacagaagaccagtaagtgtaagggtggcaatttgcagcaacgataaaacgccggacggcatcattgccgcaaaagtgccggaaagaatgacttctgcggaaagaataacggttcccatctttttcatcgcaagcaaaattgcttcttttgcaggcaaatgctggtattcattgaaccgttccatcaaaaagatggagtagtcggtgccaagcgcgattaaaataacaaaaccgaagaacggcaccgcccagctgatacccgggtagccaagcagatggacaaaaatggcctccgtcaaaccggcggatgcaaaataggtgataagaagggatgccagcagatagagcggcatgacgattgaccgtaagaaaatcatcagcacggcagccaccccgatcagcataaaagtgacagtacgcgcgtaatccgcttttgacatcttatccaaatcgcgattgatgcttgacacgccgccgatcccgatatgggcattttccaattttgtcccctttacagcgtcttttaacgcccggttgatatggccaatatccgccattgccctgttggaatacgggttttcagttaatatcagatgaaaagtcaccatttttccgtctttcgaaatataatggcccagcgctttctgataatccgcatttgaaagcagggcatccggaatataaatgccggactgttccatacttgtttcatccgccaaatcattcagataagaaccggcatcgtacaacccggattcgattttcccgagtcctgccgcgcttttatcaaggccggcggaaagctcattcatatgggttccgaacgtactgaggccggttttcagctgtgcctggccgtccgtgatcccctgaatccctttttgcagcgccgggattttccggatcacttcgttctggcctgctgcagtctggttcaaaccggtttcaagctgatcaagcccgttgatgatcggcgtaaacccgtcagcaaagcggccaagcccggcggaaatagctgaaagttttgcgtccacgctttccaaagttgctgtgacggtgtcaatctggcggtacaggctggcaattgtatcattgccattgccggtgccgagcccgagctcattcatcgcctgctgcactttttggaattgcgggtcgtgcgccgcttcaggattgtcttttaaaaacgcccggtaagccgcttgcagggagccgatctgctccggaacatcagctggcaactggtccgtttggctgataaactggcggatgccggactggacgagttggtatttttcatacagctggttaaagccggactgcagttcccttgcctgctgctgggcgttttttaccccgcttttcagttcgtccgcgcccgcggaaccgttccggatgccttcttcaatccggcttagcgagtttgacaaattccccatgccggctgagattttttcggaaccggcctccagctccccgatcccgtcggttgcttctttaaactttgatttggcgttttccagagaaccggatgcccccgttaatcctgatttgattttctgaatgccgttatggcttttttccagcccttcgcccaatgttttggcttggtttttgacataaatttctttcatcaccgaaccgtccggccttgtcgcgctttgaacttgtgcaacatgcgggactttatccagatccgcgctgattttctcgattaaagcgagatagtcttttgatttgacagactcgtcattttcgaggacgacttcgaccggcatcgctttcccggcgccgaaactggcggcaatgatgttgaacgcttttacggaatcgtagttgtccccgagttcatcaagtgaattgaaagacagcttgccgttatagctgatcaatagcggaaccatgatcaccgccacaatcgcaagggaaagaaacggccttgccagcgcaaaaaggccggcccgttcccaaattttgctttcatgttgggaaatgtccccgcgcacaggccagaacagccctttctttaacacagccataaaaaacggcacaattgaaaacaaggcaagcagcaaaacggctaccccgaccgcaacggcggaagcggattggtacagtttagaactggcaagcccgatcgaggcaaaaccgatcagaacggcaataccgctgaacagcaccgttttcccggccgaacggtaagtcgcaagaatggccgcaactgtttctttgccatccgccagttcttccttaaagcggctgagcagcaaaatacaataatccgtgccaatcccgaacaaaacggcaacgagaaaaatttgcgtaaaatttgaaaccggaaaatctagcttgtcgacgagtatcgcaacgataaactggctgacaagataagaaagcccgaccgttaaaagcggaatgagcggcgcgacgattgaacggtacaccagcacaaggacggctaggatgaatacaatcgtaatcgcttctgttcttttcaagcccgcctgcgagctgtccgtgacatcctcattgatcagcctgttgccggtcatcatcacctcgacgcccggcgtttttaccgctttctgcaaagccgcgcgcactgttttaaaagactttcctcccggatccacgctggcaatggccatcaccgtttttccgtctttggagacaagctcacttttaagggccggctcgtgaaaatgagttgtcagctccataatcgcatattgttttttatttttttccagccgttcaagcgtgccccggatacgccccatctcatggccggatattttcacccggtcatggaacacgatgatgacgcttgtaccgcggttttctgtctgctggtgccggcttttgatttcagccgcccgttgcgaggcatagccttccggaaccttaatctggcctttttccctgagtaatggttccattgccggcgctttccatgccaataaaatgctgatcattgcccatactaaaacaacaatccatttcaactgcaccaatcgcttcatgaactggtttcctcccagacttgtgatcgcataactcttgaaccattataaaacaaacggctgcagaagtatgtaaaaaaatgggcatttttatgttgctttctttccaaaataaacgaaaagtagtataattgactaaaaagtaacatgattaaaaacgaaaggagttctctatttgaattcgcataaacctgctccattacaacctacaatcgaaaacctctcttatgctgtattcacggtcaatcgccatgcgaaaaccgcaaccaacccaaaatttctgtacctgttaaagaaaaaagcgctcgaaaaaatggtccgggaagggaaagcgctgaaagtcgggctccacttttccgagcatccgaagtacagccagcaacagtctgatgtgcttgtaaagtgcggtgattatacgtttcatattccgccgtcaaaagacgattttaaaaacctcccccatctcggctacctggaccataaaacaaggaacccgaaatgccgcatgcctttaagccaggcaaagcaactgcttgaacggtataccgggctcacggaaaaacagcagcaaccggggcagccccgcaccggcaggaaaaattgcaaaccggttttcaaaaaactgggcgactcctttttctaaaggatggccgcagcaagtgcaagccaaataatggaaaagccccaaaccgggtaaagaccccgcccgggatgaataatgatacgcaaccatgcaggaaagccctccgcgattggccgggggcttttctgcgttacagcactttttcgtccatcgcaaggatcagctggttgatttcaggcttgctgatttgggcatcggcgccgaccatttcccctttatgcctcaaggcatccgtgatcagcgatgagaaaatgatcaccggcagcacttttaaggcagggtcttcttttatttttttcgttaaatggtgcccgtccatttgcggcatttcaatatccgtaatcacaagctggacttcatcctttatctcttttccgctttctgcaatcccggataaatattcgtatgcatctttcccgttttcaaaaaacgcaatttgttcatacccggcttcaagcagcgtatcgcggagcaattccctgagcaggccggaatcttccgcaatcacaatccgtttattgttccgctcccgctttccaagctttttgacttcttccacccggatcgttgcttccgggttgatttccgcaatcattttttcaaaatcaagcagtaaaatcatcgtgtcttctttctttactacgccgatcacctgtgtatcggtgcctgcatacatcccggacggtttttcaatttgatcccaggaaaaccggtggatttttgaaacattgtccacatgaaagacgattttttgctggttgaactccgtcacgataaatttgtcatcctcgcccgtttccggcggatgcccaagtactttgcgcaaattgacaaccggcagtatttccccgcgcagctggataatcccttcaatatttggatgggcgtgcggaatggtggtgaccgcagccggcatgataatttccttcactttaatgacattgatgccgtaatgattttgtgcgacagaaaattctacaatctcaacttcatttgtgccgctttccagtaaaatatcgtgctccagactcatcattttttgccccctcgttctaaaacgtatgaaaatccggcgcagagcatttttgcactgcccggttttcaatatttgcccacatgaattatatcggcagatggaccggaatttttcacctgaaaaagggcaaacggaaaagattgctttttcacaaatgtttaagcgtggtaagattaagaagaacaggacatacatatttgatgaaaagcaatccgttaaaggggaggaaaccggttttggaacatttactgaacccgcatgtacaggaaattgaaatatccggcatccgcaagttttcaaacatggttgccggaatcgaagacatggtctcatttacaatcggccagcccgattttaaaacgccggaacatgtcaagcaagctgggatccgtgccattgaagaaaacaggacaacctatacccacaatgccggcgaccttgctttgcgcaaggctgcagcacaatttgtcaaaacgaaatacaacctgtcttataaaccggaaacggaagtcatagtcacaatcggcgccagcgaggcgatcgatattacgctcagaaccgtattgacgcccggttccgaagttatcctccccgggcctgtttacccggggtatgaaccagccatccgcctgtgcggagccgttccggtgcatgtagacacaagggcaaaccggtttaagctaaccgcagatctcatccgccaggctattacagccaacacgaaatgcatcattttgccgtacccttccaatccgactggggtgacgctcgaaaaggcggaattgcaggaaatcgcagacctgatccgcggccgtgatatttttattcttgccgatgaaatttacagcgagttaacgtacaatctgcagcacgcctcgatcgcttcgtttttgccggagcagaccattgtcattaacggcgtctcaaagtcccactcgatgaccggctggcggatcggcttcgtgtttgcgccggaatggctcacaaagcatgttttaaaagtccaccagtataatgtgtcgtgcgcgccttccatttcccagatggcggcgcttgaagcgctgacagccggcatcgatgacgcacacgccatgaaaaaggaatatgaaaaacggagagactatgtatgcaagaggctggatgagatcggcatcgggtatgtgaaaccggacggggctttttacgtattcgcgaaggtgccggaagcgttgaagcggtcctctttcgattttgcggtcgatctggcaaaacagcaaaaagtcgcggttgtcccaggcagcgctttttcaaagtacggcgaaggctggttccggatgtcctacgcatgcagcatggatcagctcgaaaaagggcttgcgcgcatggaaaagtttgttgcaaacctatcctgaaacgatgcgccggctgattctcatttttcccgctggtgccgcattcaagcgcaatgggcatcatactaaaaatgaaatatattttcattcctttgctggcgccgcgttcgcctaaggaatagaagcctgcgttaaaccatactggcttcccgcccgcataaaactaaaacagcccgccggcatatgccggcgggcaaactttacttggaccaatatttaatcaatgcttgtgtgccgctgttttcttcgccttttgcggccagttcttcatataattttttgctgagtgcaagccccggcaggtcaagccccattttttccgcttcatgaagggcgattttcatatctttaataaaatgcttgataaaaaagcccggagaataatcgcccgcaagcatccgcggaacaagattggacattgaccagcttccggctgccccggcgctgatggatttgagcactttttccggatcgagccctgctttttgcgcatacacaaccgactccgtcacgccgatcatattggaggctatggcaatctggttgcacatttttgtatgctggccggatcccgggccgccctgcagcacgatattttccccgagtacgtgaaaaaccggttttacttcttcaaataccgatttgtcgccgcctgccataatcgtcaaattgcctttttgcgccccaatatcgccgccggaaaccggtgcatcgagcgccttcacctgtcttgctttcgccgcttcataaatctttttggcaagggtcggcgtggaagtggtcatatcgatcaggattgttccttctttcgccgcgccaagcagtccgttttcaccgaaatacacttcttccacatcgtgcggatagccgaccatcgtaatgacgatatctgattttgcagccgtttccgccggcgtgctgcaccattcggctcccgctttgagaagcggctccgccttttcttttgtacggttatagacaaaaagcggataccctgcattccgcaaattttgcgccatgttccggcccattacgcctaacccgataaatccgatctttttcatcctagctcccctttcttcgcaaataaacaaaaaaacctgcatcacagcaggccaaaagcaaacatgggggttcaaggaagaaaacaatctttcctctaatttataccccgcatgccctgctttaaacctgacagattaaatcgatttgacttttccgccgtcgatcaggaagctgcttccggtaacgtaggaattggcttctgaagccagaaacgcaacaaacctcccgaattcgtccggttcgccgtatctgccgagcggaatcgactccagttcctttgcctggacttcttccatcgattttccggttttctccgctgtcactttgtcaagatgtacaatccggtccgttgcaattctgcccgggccgaccgtattcacaaggatttggtacggggcaaattcttccgccagcgttttcgaaagtcccacaatgcccgtccggaacgtattcgacaaaatcagccccgggatcggctccttaatggatgaagaggcaatgttgataatccggccgccgtttttctttaaaagcggcaatgcttccctgatgatgcgtatgtacgaaagcagattcagttcgaatgatttttgccagtcttcatccgccatatcttcaaaacttccggccggcggtccccctgcattgttgaccagtatatccagcctgccgaatgtatcccgtgctttttgcaccatggcgcggatatcttccggatgggtaatgtctgcccggatatacgccactttcccggtgccgcaagcggataattcttcttttgccgcctgcagtttttcttcattccggcttgtaatgaggacatctgcgccttccattacaagttgtttggccaccgctttcccgagcccctggctggaagcgacaacaagggcggttttgcctttcaaccctaaatccattcaaaatccctccctgtatctttatgttcacaaaagcctgtcttcattataaacgatttttccccgtccatgcacgataaagcttcaaaccgggttccccttcattttcccgcaaaaaagaacatccggcgttttgatgtgcggtccgccaaagcccaattcaaaaaaagccgaatggcaaaagccactcggcaaaaatagggggaaaaatgagaaagaaacgatatacatccggtattgtaacaatactggataccaatcctacccttaatactgggctggtttatatatacccgcttccttcgcacctaaacctgtttttgaaaaaattttctatgcttttgaaagaacttttttcacgtgttcctttacttcttcattcgttgtgaagttcaaaacgtcttctgcaagtttttccatatccaccttattcaggttcctgatttgagaacgggcccttaaaatcgaagaagcgctcattgaaaattcatcaaggccaaggccgagcagaatcggaatggcgatttcgtctccggccatttcgccgcacatgccggcccatttgccttctttgtgcgccgcatcaatgacgcgtttcacaaggcgtaatatggccgggttatacggctggtacaaatacgaaatatgttcgttcatacggtctgcagccatcgtgtactggatcagatcgtttgtgccgacactgaagaaatcgacttcttttgcaaacaaatcagccattacggcagtggaaggaatttcaaccataatgccgacttcgatatgatctgcaacctgcacgccttcctggataagcttttctttttcttccaaaagaatcgcttttgcttttcggaattcatccagattggaaatcattgggaacataattttcaggttgccgtatgcgctcgcgcggagcaacgcacgcagctgggtgcggaaaatatcctgtctgtccaggcacaagcggatcgcacggaagccgaggaacgggttcatttcttccggaagcggcaagtacggcagttttttgtcgccgccgatatcaagcgtacggaccacaaccggcttgccttttaagccttcaagcaccgctttataggcttcaaactgcacttcttctgacggaagctcgtccctgcccatatagaggaactctgtacggtacaggccgacgccttccccgccgttccggatcacgccgtcgagatcgttcggggtgccgatattggcaaccagttcaaccgtatggccgtctttcgaaacggatttttcattgaccagcttcgcccattcggctttttgccgttcaaactgttcctgcttttgtttgtattcatcgacaatttcaggtgtcggattgacatagacatcgccgctgttgccgtccacgatgacaaggtcgccattttggatatcctggatcgccgttttcgtcccgacgactgccggaatttccaaagaacgcgccataatcgcagagtgggacgtacgcccaccgacatttgttgcaaacccttttacatactggcggttcaactgcgccgtatcagaaggggtcaagtcttcagcaatgacaatgacttcttccgagatcatgctcggattcggaatttccaccttcagcagatgggccagaatccgttttgtcacgtcgcggatatccgccgcacgttcgcgcatatattcgttatccatttgttcgaacatggtcacgaacatatcagcaacttctttcaatgcgtattccgcattgacctggtcatccctgattttatcctggactggcatcaacagttccggatcttccaaaacgagcaaatgcgcatcaaagatcgctgctttgtccgcccccagcgccttcattgcatgctccctgatcgcctgcagttcagacttggattcagacacagcagcattaaagcgtttcacttcatctgaaacattctggacaggccttttttcaaaagacaaatccggttctaccagacgatatgcttttgcgatggcaatcccgttggatgctgctataccttttaaaatggttgacattattcgcccagaccctcttttttcattaattcagccagagcgttcaatgcatcttgtgcatcgttgccttctgcagaaatggtaatatcggcgcctttgccgattccaagggacataacccccatgatcgatttcaggttcactttcttatccttatactgcaattggatatctgaatcgaatttgcttgccgtttgtacgagcaatgtagcaggacgtgcgtggattcctgtatctgctgttactttaaattgtttttcagccatgggtagaacgactccttttctataatatagttctaaaaataatgcactgtacatttttcgtcaatattatcaaccatcttcatacaaatgacaaattttacaaacggggttgaaaaaaccgcagcgatgccgggactcctgcaaacaccgttcatccccggctattcagcaggctgctccctcaaagtctgcgcggcccatccgtgccaaaaacatggctcgcccgaaaccgggaacacgcatgtccccggccggagcaaaaaatgacaaattttgcacagtgcgggaaaaacaaaatccccgtaatagaataacatgcctttccaaataaaacaatcattagagttgacttcattttgcttaaaaatgcacaaaattatgcataccccggtcagatttccggctcatccaaataaatatagcggacatgaccgccgcgtagtgcaatgcccctaaaatgcttaaagtcttcctcggcaacaagcactttccagaagtccataaaatcttcacggctgacgaataattcttcgatttccctgttgcgaagccggttgatttcctgtctgaattcttcttccgacatacgaccaccccacccagtattgtaccacattcttcctgccgccttcttgtttgcttccgggatttttttaaacaggcccgttttgtatttttccgttcttttcgccttgaacttttcagaaaaatagtgcaaactggttacaatactttcttacggggggaccgcaatgaaaaaagcacaaattggtgacatcattgaatttaaagacgggcttcaagggattgtcgaaaaggtgaacgagaactcggtcatcgtggatttaacctatatggaaaactatcaggaactggaacttgatgaaaaaacagtggtaaaccataaaaattatcaggttatccattcggctttgcgttaatttaaacgcttaccgcgcagtaaaaaaaccggcacatgccggtttttttacttccatttccatgattgtgaattttttaacattattttcccggatacctttttccccgtttctctgctaaaatattcaatgtatttttgtttggcccaatgccgcgaaggccggactgcggggccggatctcttttttggcccttcccggctttttggccggcggttttcgaacttaagaaaggagcgcattggcggtggcaaaaaacatggtggatacaaagcttctcggaagtatcttgatcgcccaccttctgctatatattacgttccgggatatctctgttttttggtatttatattccggagcgatgctgtttttgatcagttacacggttttccttggaaaatcagaaaaacacgaaaagcttccgtaccttcaattgctgctgtatggcatcttttcgggttttcttctctatattattttcagaattggcaatacggttctcggttttttgccgggcgggcttgacaacgaagtcgcccgcgcatacaggcgcttttcgcccgaaactttctggcattacttagcacttgtcctgatcctcattcccggggaagaaattttttggcgttcgtttgttcagacccggctcatgaaaaggatggaagcaaaatatgccattttgatttccgccgtattgaacgcatccgtttatttttactgcggattaaaaatcatggtcattgccgcttttgccggttcgattttctgggggctgctgtatgcaaagaaacggagcctgcccgcgcaaattttgtcgcatcttacctttgatttgctgcttgtcgtcttcctgccgattttttaagcaggggacggctttttttctgcatttctccgccataaatagttgttgcgctgcacaacaaccgcgcaaagctgtttttatggcgttcacctgtcacccccggatcgtctttatcccgagcgccatcataaaaacaaggctgaagtaaccgaacaacggatataaaaccgagagcagcgggccgtaatgcaagctgctgatcagcagaatggcggaaaaaatcaacccgtacagcaaaccgcttttcatcggcatatatttttgcatttgccgctcaagcccgtaggcatccccgataatagaagtgaaaatttccccgaaaatcagcagaacataaataaagtaaatgcccggaaaactcgctttcacaatatgcgccatcggaatctccactttggcaacatctggcagcgtaaccagtgacaaatggctggaaatcaggatgagcgttaaaaacaccccgcccagtatcccgcctgcacggacgacttccttatctttcacttccgccgcaaccgggacaagcaccgcctgcgcgagcgccaaattcaaagccgcataggaaagggcacggagaagggcacggggcatatcaacactttccggccgggccataagcgcctgaataaatccgggtgactggacggactgcgacaaaaggagaaaattaaacaaaagcatcaaaggcacgacaaacgtgttgacgccaagcagccccttgatgccaaagcacatgacaaaaaaggcgagcagcaccgtcaataaaatccctgtccccctgccaacacggagctgttcctcgaaaacagcacccgcaccggacagcatgacgccacagaccccgaatagcatggccatcatcatcacattcacgaaaccggccgcttttttgccaaataaataccggtttaaggtttcataggaatccgcatgtaaatcgatcgctttttccatcatttttgtgccaaagaaaataaataaaaaccctgaaaggcagatggcaagcaatccatacagcccaaactgtgtaaaaaaaacggtaatttctttccctgttgcaaaccctgccccgatcaccgttccaatatatacggctgcgatttggacagcaaagccccacttattcaacgcctgcacccctttaagaaaaaataagacaacctgccgtctccgttactatcctatgtcccgctttcttaaaatagcccggccggttcatttccgccgctaaaaaattggtcaaaaaaagtcaaaaaaaccctttacaaacaaaaaaagttgtcatatactataggcaaaggtcaaagatagtcaattataagatggtgccattggccgatagcgcaaatgacaaatgcagatcttttgattttcgggccgcgcagttgtatcatgatattagaaaggtcaaaaatagtcaaaaggtgactcgcagatgccgtttcctattttcagcacaagacaaatgactttgcctttctactgtaatggccaaaatgcatcaaaggggtgcatgcaaaagatttgcatcttgtgaaattttgagctatactgatttccaattaaggtcaaagcaaatcaaagcgctttgattgtttttcaatctcattagtcaaagatagtcaaaatcaaaccgatcaaaggaggaatgtttgatgttatgtgacaaatgccatcaaaacgaagcgacgatcgggatgcatataaatgtgaacggaaaccaaaaaacattgaatctgtgccagtcctgctaccaaaaagaacgggcaaaattcgaaaacaactggggaggcatgtttatgaataacggatttggaaatttcggattcggaggattcaacgacctctttaaccaaatgaatgccaacgggttccagccaaacggcgtgaaacaaaccgtacaaacgcaaacacaaggcggcggcagcggactacttgaccagtttggccgcaacctgaccgctgctgcacgggccgggcaaattgaccctgtcatcggccgtgatgaagaaatcgcccgcgtcattgaaatcttaaaccggcgcaataaaaacaacccggtgttaatcggcgaaccgggcgtcgggaaaaccgccattgcagaagggctcgctttaaaaattgccgaaaaacaggttccggcaaaactgcggcataaagaagtttacttactcgatgtggcttcgcttgtcgcaaacacgggaatccgcggccaatttgaagaacggatgaaaaaattgattgccgaactggaacaacggaaaaacgtgcttctgtttattgacgaaattcacctgcttgtcggcgcaggttctgcagaaggttcgatggacgcaggcaatattttgaaaccggcgcttgcccgcggcgaaatccaggttatcggcgcgaccactttgaaagaataccggcaaattgaaaaagatgccgcacttgaacggcgtttccaaccggtacaggtcaatgaaccaagccccgaagaaaccgtcatgattttgcgcggcttaaaagaccggtatgaaaactaccaccacgtttcctataccgatgaagcgattgaagcttgtgcgaagttgtcgcaccgctacatccaagaccgcttcctgccggataaggcgatcgacctgatggatgaagccggttcgaaattgaacctgacgattgcggttccgagcaaagaagatattcaaaaacggcttgctgaaattgcgcaggaaaaacaagctgcgcttgcaacggaaaactatgaaaaggcagccgaactgaaaaaagaagaacaaaaactgaacgagctggctgcttccggacaaaccgaagccaaaccggttgtcgatgtcacgcaaattcaggaaatcgtcgaaaagaaaacgggtattccggtcggcaaactcgaagcggatgaagcgaaaaaactgcagcatctggaagaaaacctcgctaaaaaagtgatcggccaggatgaagcggtccggaaagtggcgaaagcaatccgccgttcgcgtgccggcctgaaagcgaaaagccgcccgatcggttcgttcctgttcgtcggcccgaccggcgtcggaaaaacggaactgacaaaacggctcgcggaagaactgttcggcacgaaagatgcgatgatccggcttgacatgagcgaatatatggaaaaacacagcgtctcgaaactgatcggggcacctgccggctatgtcggttatgaagatgccggccaactgacggaaaaagtgcgccgcaacccgtacagcattattttgctcgacgaaattgaaaaagcgcacccggatgttttgaatatgtttctgcaaattctcgatgacgggcgcttaaccgatgcccaagggcggacggtcagcttcaaagataccgtcatcattatgacgagcaacgccggcacccaatttaagcataaaacagtcgggttcgctaaaagtgaagcgatcaaagaatcgaatattctcgattcactcggcgacttcttcaaaccggagtttctgaaccgtttcgacagcattatcgaatttaaaccacttgaaaaagaacatttggttaaaattgttgacctgatgctcggcgaactgaatgaaacgctgaacgaacaagcgattacgcttgacgtgacagcagaagcgaaagaaaaaatcgccgaactcggttatgacccggcatttggggcccgcccgatccgccgcgttatccaggaaaaaattgaagaccggattgccgactttatcctcgaccatccggaaagcaaaaacttaaaagcggaagtccgcgaaggtgacattgccatcgcggaaaaataaagcaaaaaccggcatgcggacatagcccatgccggtttttgcattccggcagatggacagcacgggccatctgccgggttttttatgtttgtaaaaagatcgaaagcagtccaaacccggctgttgtaaatcaatcagaagaaagccgggttttattacccggccaaaaccagtccaaacaaaaaggcgggcgggaaacatattcatccggaatattgatcagggattcatccgcactcaaaggagaaaaaccaagatgcaaaggttggaagcagttcccctgtttgttaaacaagctgcatggctttatacgtttttctcgcttcagccagattgagccgctgcactttttcatacaatatgaatgacatttcccggataatcaccatttcggatgaccgggcgttgtgctgctttcgataggcttcatactcattcatgagcgaatccagctgctggctgcaccggaccgttttctcatgcgtcaggcccagttttttcccaagctctatcatttcctgacgttttttctgaattctgtaaagatacttgttctcatctaacatgtgcgtgtccactttcaaattctcctttagttctctttttctattgaatgattgttatcccccgattatgcttcaaaaaatgtgaggtgttacacatggaaaatggcggactattctgccggttttccgcatgatggcatcgtggcaaaagttctctgcaagccggaaaggcgcaaaatccctgcccccaccctgcttattttaccattactaaagtagtatcgcaggtcttgacagaaatgtaaatacaatcgcaatattagacaaaattttcgccaaaaattttcacatctcccgaaaaaaccacccgtttttcaccgctccatgttttttttggtcacgcagtggaaaaataaaagagaaaaagacatgaaagaagtgaagcagatggcaaaaaattttctgttggccaaagcagccggatggttatttcgttcaaaagcaaaacagtatttaaacgaccggaaaaaaaccggcgatctggttaaccgcgcggagaaaaaagcactctccaacaaaatcacgcttgccaatatgtggagtaaaatccgcgtccttttccagcttgtcagggcatgggcaaaaggcgaataccgcaccgttccgtaccggacgattctcatgattgtaatcggccttatttatttcgtatctcccattgacatcatccctgattttcttgccggcgcaggccttgttgacgacaccgccgtgcttgcttttctcctgacgcaagtgaccccggatttggaaaaatttttacaatggaaaaacaaaagagataaaagttgaaccttggtccgcgcgggatttcaaaactttgccccttttagatcatcgtcccttcaagatggagcaggaatgccttttgatcgatccggctcccggcatagcctgttaacgacttgtcttttccgatcacgcggtggcaggggatcaggatcggaacagggtttttccggttcgcctgcccgacggcccgcacggctttcgggttcccgacagcctcagcgatgtctttatacgagcacgtttctccatacggaatttttttgagcgcttcccaaaccaccatttgaaagggagtgccggagacagaaaccggcacatcaaaacgggttcttttctttgcaaaatacgcttccagttcactggctgcgcgcaaaagcagcgggtggcggggttccggcataccctcttcatctgttttgccgaaagaaacggccgtaatgcctttttcatcagcccttactgttaaaggtccgattgggctttccagccaaataaaagccattttcatcacctgcttcctgctgcacgggaagaaagatatgaaaagttgtgccttcccgtactttgctttggacttgaatgaagcctttatgctcctttatgattttataactgatcatcaaaccaagtccggttcctctttcttttgtcgtatagaacggctcgcccagcttttcaattttatcgtccgggatgccttccccttcatcgcgaatgcttgtatggaccagccctctttccttttcgtaacaaatcttgatatctatttttcctccgtccggcatgacttctattgcatttttaatgatattgataaagacctgcttaagctggttgccttcgcaataaacatccggaagcccatcgtcaaagcggcaggaaatctggatattgtgcatcagcgcttgcgcattcagcaaaccaatcgtatcgcgcatgattttccggatatcatgattttggaactggattgcctgcggctttgccagcaccagaaagtcggtaataattgtttcaatccgcgccagttccgatgtaatcacgttaaaatataatgaatgctcttcctctttcatgctgttttgcagcagctggataaaacctttcaaagctgtcatcggattgcggatttcgtgggcaatgccggccgcgagctccccgacaatattcagggtatccgatttgcggagctgctcctgcatcgcccttctttcggtaatatcccggatgaccgttaaattcatattcgatgtcaggttcccttttgacgtgatctcataatatttcgtttcattggcttttgaaacattaaacaaataatctgccgtcccgttctctttcaactgaaaaagatggcggagaaaatctttttgcactttttcgtcattggtaagcaataaattttggattttcttcccgatcgcatcttcccggctgcagtcgaaatagttcgcggctgcagggttaatatcgacaattttcaaatcccagttccataagaccatcccgtcgatcgatccttcgaacactttccggaaccgttcctcgctgtcccgcagcgtctgttccatcttgtaacggctgctgacattgcggaaaatggtcacatggtaattttctgcgctgatataccgggatgtaaactcgagatgcttcagctgcccgttcggcattttaaagagcagttcttcgcgggctgccgggatgtggttcagcctgttgaactcccggcaattcccgccgttttcgacataaacaaaatcgctcagctttttcccgataaactcctccatcgtgcactcgaaaatttttaaagcggcttcgtttgccaacaggatccggccgttttgatcccaaaatacaatcgcatccattgcttccaaaaaaagggtcctgtaaagctgttcatgatctcttaacacaagtccccttttcttttggctcataaaccgatctgttcccaaatttgttctccccttcttcataagaagcatgcccctggattcatcatcatttcagttttcagcaaatgcccagaaaaggtctgctgcataaaggtttccggctgctatttaagaacatattctttttgagaagatatgtcaaatgaaattgcaagatggatgatatggtggtaattcgtgatcaaacgggggaattccccctgccatttccgcaaaaaaggatggcggccgccatcctcattctttattttttttgcattttttctttttttttccggctcctctttgagccatgatttcatatatcttcccggcattgatgtccccgaattccagccccgcttcttcccggacattttgttttctgcggttcatgaacgccctttcctgcctttttttgaattgcggtttgcccctttcaccgcttcttccccgcgggcaaattctgcggagaattctgtttcggccagattttctttcggggttttgttatgttttgcggctgcatcaaattcagcttttcgtttggccatgccgtcccctccattatttcaggttgcctgcttcattagcatgcccgcgcatcaacgctttatggccgcaatatctgtcaaaaccggctccgggtgcatgcaaatacaactgtttccaaacataattattttccggaggatgatactattcataaaggctgatgccgcaatacgggcggcagaaagaggagccaatttaaaaaaaggagaatgatgatggcgagaaacagcaataaattgttggtaccgggcattgaggcatacatggaccaagtaaagtatgaaattgcccaggaatttggcgtgcagctcggatcggataccgtatcacgggcaaacggatcggtaggcggagaaatgacaaaacgactcgtgcgggaggcccaatcccacctttccgggcaaaacccggaataaaagaaaaaccggcaaagcgggactcgcctgctttgccggtttctttacatctgttgctgctttttacccgatttcccgccggaatgcgcctccttgttgctattttttttgcggacggagaaaaaatagccgcccgctgcgatcgcaagcataactgcccagaagatcagtttccacaaagcggactccgggaaatgttcatcaatcagcccgacgcccggatgcgaaagcgtaaaaacgagcaattttaccccgacccagccgacaatcagaaaagcggcatcttcaaggcccggatatttttccagcaggcggacaaaccggttggcagcaaaacggatcagcacgagcccaatcaccccgcctaaaaacatcacgatgaactgcccgccgttaatgcccccgatttgaaacgaaccggccgggcgcagcgtcacagccatggccacagctgcaagcatggaatcaatcgcaaacgcaatgtcggcgagttccactttaaaaaccgtcatccagaaagaaaccggcttcgatgcggcttctgcaagtttcgggccgttttcctggcgcttttttacaaaatggtggatcataataaaaaacaaataagtggccccggcagcctgaatctgccatatgtttgcaagaaacgaaatgagaaacagggcggtgagccggaatacaaatgcgcccagaagcccgtaaaagagcgcttttttctgccgggcgtgcggcaggtgcttgaccattaccgccattacgactgcattatccgcggctaaaatcccttccagcccgaccagcacacataacacccatgcatattcaagcagcattgtaaaatccattccacaaagtcctcctttgccggcacccgggaccattgcccttacagatcaaaaagcggcattccggcccaggcgcgtccggcgtgataagtaaagtgccccttttgacaatttcctgtaaagacaaaaagcaagacctttacctgtacaggcaaaggtcttgctggacatccggacggtgccaacaaagccgatgaccgccgaaacggatcatgtaatgacgactttgttttaagtgtgccatgcacacttaacgctactcccctttgacaattgtcaaaagtattctgttattttgattatatgggatacatccatttccgtcaactgttttcatgcgattttcgcgttaaaatttttcggagcagcccgccggccaaaagtccggggatggcacaaaacatcgggaaaaacacgggcccgggcattttttcccggacgataaccgcaggggagagcattaatccgatcgtcacaaagtaagcagcaaacacaaaaggcagataactatacggcttaagattgccgcaggccattttatacgcatcccacatggcaaaaaagtatagacaaggataaaacatcagccatccgtaatcgatgatgtttccggcttccattgtttttccgagaaaactgagcatgatcgcttcgttaaaacggctgttcacattaatcagaaactccataaaaataaacgcgatgcccttcacataacggcccgccaaaagctgggcaaaacccggcaaggcaatgttccaaacaatcgcctcaagcggtgctaattttttcatgcgcatgcccctttaaaactgaagttggcaagtcgccatattctcccgttttcatgtgttcttatcatgccccggataaaagcaaaaaacactgtacggcaaagccgcacagtgtttttttattccatcggattatacagtttaatgccgggatgcttgtccgtgaaccagcgcaatgcaaaatcattttcaaacaaaaacaacggtttcccgaaacggtcttttacaagcaggctgcgcgaactggacagggattcgtccaccgtatccccctcaatccagcgcggaattttggaaccgatcgattctatcacgacatcggagttatactcatttttcatgcggtgttcaaacacttcaaactgcagctgcccgaccgcccctaaaatatagtcttccgtatgccatgtgcggtaaagctggatcgcgccttcctgaacgagctggttgatccctttatggaaacttttttgtttcatgacgtttttcgccgacacttttacaaacagttccggtgtaaattgcggcagcttttcaaattggaccggctgcttcccggagtagatcgtgtcgccaatctggtatgtgccggtatcatacaggccgagaatatcgccgctgactgcttcttcaacagtgctcctgtcatccgcaagaaactgagttgactgggacagtttcatttgttttccggtcctcgcaagcgtgacggacatgccgcgttcaaattttcccgaacatatgcggataaacgcaatccggtcgcggtgggctggattcatattcgcctggattttgaacacaaaacccgaaaattgttcgcttaacggatccaccaccccttcgtccgtctttcttccttgcgggggcggcgcaaattgaagatacgtttccagaaatgtctgcacgccgaaatttgtcagggcactgccgaaaaagaccggcgtcagcataccatttgcgatccggctctccgaaaattcattgcccgcttcatcgagcagcatgatttcttccagcgcctggccatacagcgcgttttccttgatcggggcatccccttccacttcgcccgcttcattcaacgccagaaaccggtctccttcttccacgcggaactgctcgatgcggcggtgataacggtcataaatgccgagaaattcttttcccatgccaatcggccagttcatcggatacgattcaatgccgaggatttcctccagttcagccagcagctcaagcggcggcctcccttggcggtccagtttattgataaacgtaaaaatcggaatcccccgcatccggcacactttaaacagtttaatcgtctgtgcctcaatccctttagcagcatcaatgatcatgacggcgctgtcgacggccatcagtgtccggtatgtgtcttcactgaaatcctggtggccgggcgtatccaaaatattgatcctttttcccgcatattcaaactgcataacggaagaagtaacggaaatgccccgctgcttctcgatttccatccagtcggaagtcgcaaatttcccggtttttttgcctttgaccgtcccggcggcgcggatggccccgccaaacagaagcagcttctccgtcaatgttgttttcccggcgtccgggtgggaaataatcgcaaaagtccttcttgataacacttcatctttaaatcctgccatatgtcagttcctttcaatcatgtagagtaggcttgtttttgcatcgttttttttttttacatcggccctcaccttcctaataaacagtgcacaaatcatccggccattggagactgtacataagcatacaacagtttttccttattctcaatgaaagaaatctgccggaaaggccgggttcttcttggcttcacagattgccggatgctttgaggcgcgcatcaaaaactgccagatgcctcctgttccccgtccggccccgcccagggcagaaccacggtgaaaacagtgccttccccgggtttgctctctatggaaatgtccccgttatgctctcttacaatctggtaacaaaccattaaaccaagcccgttgccgcgctcttttgtcgtataaaaaggctgtccgattttttccaatttttccggcgggatcccgattccctcatcccggatcgcaacggctgcacgttccccggccactgaaagttcaacggtcagcgttcccccctcttccattgcctccaggccatttttgattaaattcacaaatacctgcttcattttcgaatcatcacagcaaataaaaataggctgcgacggaaaaaccgtttcaatttggatgttttttccgtacgattgcgtctccattaaaacaagcacttcatcaagcaatgtttgcaggcagcaaactttcatatccgatgctttcggcctgccgagaaaaagcagctcgcttgaaatcatttcaatccgttcaatttcattttgcataatatcaagataatgtcctgtatcaattacgccggcctgcatcagctgcaaaaatcctttaatcgcggtgagcggattccggatttcatgcgcaatgcccgcggcaagctgcccgaccatggacaactgttcagatgatacaagataatcgtataattccttgacaaccgtcatgtctttcgtcagcaaatggatatggggcttttcgccatattttagatctttaaagaccgcataagtggactccacccatttgtaatcaccgtttttcgatttcatcctgtacatgaaaaggcccatttcttcttcctctccatttagaatgcctgcccatttgttgcagtcatcgtggtgcatcaaagcagaaaaaggccttcccacccaatcgccggcatcaaaacccgttacagtctgcatatcagaggaaatgctttttaaaataccgtccattccgacaacagcagaaaaaagatgaaagcggagcgggagatccataaattcataatgtatttttccgacacccatatttttgcacctgcctatctttctatcaatccgtttttcaagcttttttgaaatgaactttcatgctcaatatatgtctgaagaagaccgggcattcctgtgattatgtatatatatttcaactatatatctttttcaacaaaaatatccatttatttataaaattttatgtcgaatcctcactgtttatcaaccgtttcgacatgtgatacaatgaacgtatcaagataaaatgagaaaaggaagcgatgctatgcgttttgcaactgttggaacaagctggattacctctgcttttattgaagcagcaaaattatccggaaaattaacccttgaagccgtttactcgcgcagaaaagaaagcgctgaacaaatggcggaaaaacatggcgcaccgaatgtgtttacggatcttgaagaaatggcaaaagacgggaacattgatgctgtttatatcgcgtcgccaaatgcgctccattttgaaaacgtgcttgtttttctgaaaaacaaaaaacatgttatttgcgaaaaaccgattttttcaaatacggaagaatttaaggaagcttttcgtgttgccgatctaaatggtgtatttttatttgaggccatccggaatatccattatccgaataccgcccttttaaaagaaaaattaaaagatcttggccagatcagaagcggaattttccaatatgtgcaatactcttcccgctacgacaaatttcttgccggcgaagagccgaacgtgttctcgcggaacttctccggcggggcattaatggatcttggcgtctacccgctttcgcttgcagtctggttatttggcacaccgaaagacagccggtacttcccagtccttttgcggaacggcattgatggggcaggcacccttgtcctcgaatacgaagggttcaatattaccgtgatctgctcgaaaatttcccattcttatattccgagcgaaatccacggcgaaaaaggcagcattatcattgaaggcatctcagaattggaaaagatgaaatttgccgatgtgcggacaaaggagccggtcctcttctcgcgggagcaggaagcgcaaaatatgatgtatgaaatcaatgatttcgccgatatcatcgcgcaaaatgacaggaaaacgtatgaaaccttgcgccagtccagttatgaagtcctttcggttatcgaaaaatcgcggaagcaaaacgggattatctttaaaaccgacagaaactaaaaccgggccgaaaaaaaagattccggatcgtaccgtgagcttaagcgcaaaaaccgggcaacaggccgcgcgaaattttgaaaacagacggcagtggcaagaagcgaatctccttgtccttgcctttgcgtttttaaaaccggagaaaaccgggacggccggggggaatgccgcctggtgctatcgttattaaaccagataaagccgggaaagttaccaccattcgcaacttgtttataattattattgtttaatattgacttttaaatgatatatattatactaaaagtatagcaagaccaaaaccggggaggaatgaaaatgtatattgaaacagcgttaaacgtgcaagttgcaaactggagcgtcctgtatacaaaactgcaccactaccactggtatgtaaaaggcccgctgtttttcacgctgcacgtaaaatttgaagaactgtacaacgaagctgctacggtggtcgatgattttgcagaacgcatccttgcgatcggcggaaaaccggctgcttctttcaaagaattccttgaacttgcaaccattgaagaagcaaaatccggcttaaccgctgaacaaatggtggaatctcttgtaaaagactacaaacagatcgccgtcgaactgaaaaaattgatcgcacttgccgaagacaatcaggattatggcacggctgacatggcgacaacgctcgtggaaaacgttgaaaaaaccatctggatgctgagcgcgctgctcgctgtaccggttacgcaataaacccccaaaacggccctgttcttcaagaatggagccgtttttttcatgctgcaaaatgggcgccgctttttgatccggcccttaaaatgccggctttttcattgtcctgattcaatacatcaagccccggcacccattgcatgatggcggctttacaggcaaaagagtgatcatattttatggctcaccgcacatcccgcggacgcaaacgctggatcgcgccctcttaaaaaccggcagcgtgacaaggcctgcagttccggataaaatggaagcagtacaacgcgaaagaaggcttttccatgcatgtttccattttgattacaatgtttttaaccggacttattttaggatttatcggcgcaggcggtgcgggctttatcatttccctgctgacaattttattcggcgtttcgatccataccgcgcttgcgactgctttaacagccatgatcttttcttcattttccggggcggtaagccattaccgagaaggcaatgtctccattaaagcaggcattacaaccggcatcataggcgctgccggagcctgggccggatcccatgtctccgcgcatattgcaagcggcgaactaaaatggctcaccgccggcatgctcatgttctcagcctttctgctctggctcagaatgtttttgctgcaaaagcaatccatccaggcaaaaagcattccgtccgggccccgttttgtggcccgctcgcttttgctcggcatcgtaaccggggcgctctcagggatgttcgggatcggctcgacgccatttatccagcttggcttaatgatccttctcggcttatctgtccgccaggctgccggcacaaccatgatggtcattatcccgattgcaataggcggcggactcgccagcttccagcaagggacactggatctcgggctgctcgtggaagtcgtcatcggcacaatgtccggcgcatacatcggcgccaaatttacaaaccgcgcccccgtcccgctgctcaagtcttcgatgattgccgttccaattgtcgcaagcttgctgctgattttttgaaaaaggggctcccaaaaaccgttaaacgattgatgggagccccttcattttgaaaggatgatccagtttggtgtttatgatggtgaaattcagccactattcccgcaagcgtttcatgaatttcatcgatcatcagcgcacgagccaaaatgggacagcccctttttcccgctttaaaaacgcgaggatttatcctctcttgaaaatccgctgtcccgtccaaaaagttgctggttctggccgaaaacgatgtcccggcatgaaaaaatgagcctttcactcttccccccgctcgtttaaacggctgcagccggagccagttcgattgccggcccaaaaaattcatagcggatattttctttggccacgccaagctcagttaaaatttgcaccgtatttttcaaaaatgggaccggaccgcaaatataacaaaccgtttgcgcagttaccacctttcccaaaaatgctttggaaagatggcctgtgaaatcgcagccgctgttttcataaaggggatgcccgtacccgaaataataatgcccgttttcaagcttttcaatatggtgttttgcttccgctttaaaagcatggaaatcttcattgcgggcagcatgaataaaatggatttcgcgtttagagccggcatccgctaaagcttccagcatgctcatcagcggcgtcaggccgaccccgccgctgatcagggcaaccggtgctggttcatcggtaagtgtgaagacgccggccggtgcgctgatctcaagctcatcccccactttgacatgatcatgtaaatacgttgacacctttccatttggttcatgatccgcttcccgtttcaccgaaatccggaagtactcatgtcccggcccgcatgaaaggctgtactggcggttaaacaagtatgtctcacccggaatttttactctcagcgtaagatactgccccggaagataggacggcaccgggcccccgtccgccggttttaaataaaaggacgtaatggcattgctttcttttactttttttacaactgtgaacggtttaaagccttcccatcctcctcttttggtttccgcttcccggtacatttttttctcgacttcgatgaaaacgtcggcaatggatccgtatgcttcagcccaagcctgcaaaacctcttccgtggccgcatctcctaatacttctttaatggctttcagcagaaattccccgacaatcggataatgctccggttgaatgcccaggccgcggtgtttgtgtgcaatttgttccacaaccggcaagatcgtttccaaatggtcaatataagaagcagccgctaatacagcattggcaagtgctgtttgctgccttccctgtgactgattcgtttgattaaaaatattcagcagctcggggtgtgcggcaaacatcgttttatagaagtatgtagtaatgtccgtcccctgtgtttttaatacgggcacagttgattttacgatctcaatggttttctgcgataacatgattttcactctccaaatagtagtatttaaaatatatctttaagatagtacttcttcgtttttaaagcaatattttaaatatatctttaataatgttgtcacattttccggaaaggaaaaaaatgaacgccattttcggcgggaacaggtataatggggttggcaggtgatatcaatgcgtttaacccattactctgattatgctttgcgcgaattaatctatctcgcttcattggaagaaggaaaattagccagcatcaaagaaatcgcggatgcctacaatatctcgaaaaatcatttaatgaaaatcacatacgagttaagccagctcgggctggtgaaaacagtacgcggaaggggaggcggcatatgcctgaacaaacatccccgcgaaattaatgttggaaaactgatccgcataacagaagatgattttaaactagtggaatgtatggaagatggagcctctgcctgtatcatctcccctgtttgcggattaaagcatgttttaaacgaagccctcaacgcttatctccgcgtgctcgacaaatatacactggaagatttagtaaaagaccccctgtcctaccggcagctgcttgcacactaacaaccagggccgcacttttgaaatgcccggccctggttaaaccggaatttttaacgtttccttccccactatgcttaggtcccccctctccctctttatttctcttttattccgaaaaatgcccattccaaaaaaattttgtctatcgctcccaaaaagtgttaaaatgatagataaattatataaatataaaaattttggtgaaggtggtttggcgatgttaaaggaagcttttttaaatactttgtatgatgcttacaaaaatggaaaagcgctgaacaaggatatttttccgtcaggcatcgatttagatgaggcttaccggatgcagcatgcttttactgcagcaaaaaaagaaaaccatgaaacgttaaaaggttataagatcagcatgacaagccctgaaacacaggcattattcgatgcacgcgaaccattgtacggcgagttgacagatcaacaagtggcaaaccatatatccctgagcaaagatacgcttcatccattgatcgaattggaattggtttttcttgtaaaggagcggcttacggcagacgcgtctgaagcagacatcatccaaaagacacaagttgcgccgggattggaaattcctgattcccgattcaaggactggttccctaaaatgccaaaagaacaagtttgcgcagacggggctgtcggcggaaaagtggcttttggggaagccaaagattatacatatcgcgatattgatgatatccatggccaattgctccttaacggtaaagtgctcgatgaaggcaaatcttcagctgtcatggggcatccgcttcatgccgtaaaatggctgctgaaaaaactgggcgaacaccaggcagcgcttgaaccgggcatgtttgtctcatccggcacatttgtcctgccgaagccgctggaagccggaacatacagcggaaaatttgaaggaattggcacggtgaagttggcggtcacagaataggaatgaagcacccgcacagataatgaacggcaaaaaacatctccggaaatgccaacaggagatgtttttttgcggacatacaggcacgtgtttaaaattaaccgcgtttgcagatttcccccggcacttaaaatggatggctttcaaaatcggccggggttcccagtccatgccgcaccagacaggcaaaatgggttttcaaaaagagaaagggatcatataaccggccagttgatccatggttttacaaaattatattccttccggacggtacaatgggcagtgcatccatattaacggcggcatggcaatgtcatcctgattgtaaaaaaaactgcagaaaatcttttctgcagttttttaacgcttccagccaaatattaagggccttggccaacagaaaaagcgccaaaagatttggcgctttttctgtttaaaggctgagccgagacccggaaaaagccggcatgccctgccatctccggcaaataaagtaatgcaaattccctacagccgtttaattgtacaggtgcttattttcctcttgtttttccatcagccaccataatgaatgtcttggattttctacagcttctttatactccgttttcgtcgccactgttgggtacgaaccctttagagattttccagaagtactggtgaacaggaacatgatgacgaaaaagccgacaaggctgaagattgtcagataaaaagcaggcgccaaggcattgccggtttggtggaccagccatgttgagatgagcggggtagtgccgccaaataatgatacagaaacattaaacgtcacagccagtgttctgtaccgaatatccgtgtagaacattgttggcaaagtaccaggcatcgtaccttcataagttgaaagcaggatacccaaaatgagaatgccgaaaaagatgaatataattgacttcatattgatgaagtaaaatgcagggacagataataatgttaacccgcccaagcccatgattaaaaccgtcttgtttccaattttgtcgctgagcttcccaaacaataaagcgagcgggaccataatcaccataatcagcgtaatcaataccgtccctgctgtaccggataaaccaataacctcatctaaatacgatggcaagtaggataataacatatagtttgtaacattaaagaatgcgacagatacgaaacataccagaatgtcctttttatggttttttaaaatcgaaaggaagctttcctcctggataccttcctcggaaagtttattttcaaaaatgggtgtttcctctaaatgggctctcaagtaaaacccaaccagccctaaaggcaagccaagcaaaaatggaattcgccagccccatgtgaccatctgctggtcagttagcgtgatgaagagcgtactggcaaggagtgaagctaatatatagccggcaagcgtaccgatttccaatccgcttccaagcacattacgcttattgtccggggaagattctgcaatatagaccatggcgccggcatattcgccgccagttgaaaagccctgaacaattctggctactaataagaacaccggggcccatattccaatttgatcatacgtaggtaataaaccgattaggagtgtggaaaaggccatcaaaataatcgtgatggttaaaacgacttttcttccatatttatctccgattctgccgaatataatcccgcctaaagggcgcattaaaaaggcaatcgcaaatgtggcaaatgtaaatattaatttcagctcgtcattctccacagcactaaaaaagttccggctgataatgaccgctagataagaatacaagccaaaatcaaaccattccatcgcgtttcctactcccgtagcaaacacactttttttcgtttgtcgaatattaacgatgttaatttttttcttgttaaataccatttttcaaatctactccttattatgatagttttcggcatctgtcttcccttctataaagattcgtttttttgatacttgcattgataaaagattttttcatcttccggcatttgttttggttttctttttcaaaaacccgcagacgaatgcaatgggaatcatcattgaaattcaaaaaccactcgtcgatacttcggcatttctgctaatatttccagaaaaaccaccgaatagatggcaggcatatgaagtgcaagaaattgataaacaactcgaagatagcgggcaagtgtgcagtaagcaaaatgaaaaagggcttaagatggactgtggcggacgggaaacggaggcttaaggcgcctctaaagatttttacaggcaactggtttccccacctatcttctttataccttaaatagtgaaagcgggttataatgccgttaaagacgggacacatcacggatgagtaaccggacagcgctcaacagcttttttgaacgatttattaattagtttaccataatcgaaaaattaacgcaaaaaatcagcttacccccattatttcaacggatcaggccaacaacaatgctgtaaaatggtcattcaatatgtgcttaaatacttctatttttgtctcacaattataaaaaatctgcttatgttcttcatacttttatctcccacctgctcttccccgtctccataaaggatacaagcgatgtaagcgccatctccgccatatcgctaaccgcctggttggggtaaaacgcagtgtgcggcgtgacgatcacattgggaaaagatatcagaacggccagctggcggtgggccaaaatatccgtgcggcggtcataatgaaaaattccttcctcatcctccagcacatcaatcccggcagcgccggctttccccgcctcaatccctgcgatgagcgcatccgtatccacttcagcaccatgggaacaattgatgatgcatacaccgtccttcatttttgcaatacgatcctggttaatcatatggtatgtacgatcaaataagggtgtgtggatggttatcacatcgctttccttcagcagttcatccaaagatacatatttcaaaatgccgcgcaattcatctctttcaacggtgtcgtgtgcaatgatgttgcagccaaaaccggacaaatttttcgcaacaatactgccgattctgccggtgccaataatcccgatcgttaagttatgcatttccctgccctgaatcccttccacagaaaaatcttgggcctccacacggcttaagatctgttttgctttccgcacacacatcaaaatcagcatcgttgcaaaatcggcgacacaatagggcgaatacgccacattcgaaaaacggatgtcatatgctttggcggcttcctgatcgatatgattatatcctgcagtcctcaagccaatatattttacaccggcatctcttaaagccataaaagtttcggcgccaaccggataattcccaaggatcgtcaccgcttcagccccttttgcttccactgccgtttcaggggttaacacatcatccacatacttgatgtccaaatcaaattttctcgcgaatttctgaaataaggggaattcatccgccctcgtctcataggcaacaacttttctcatacgacagcttcctttccattcattttgatcatgctaaaaacaacgcagggcttcattaaccacgaccgcaataaacccatctcctccccatgtctcccaattggattccggtgtccagaatcctggttttgccacgccagcgccaagatacccatgcccaatccaacaagacggatcagcgattctttctatttcatttttgccaaagtgaacgatcgtccggtctttttgtacatcgtaacggcttcaaaagcaaagattttacgtgtttcctataaaacccctacactttttattcgacaaaagtggcagaaatccttgtcaaatttgtaatttttgtttattcaggaagttctagatagtcgctgtctaaaagcactgcgttgcttgaatctacttctgactggaccgataaaatatgactggagaattgtacactcaagctttcaaataaagttttccgttgttttcatatgaaaatctttgagataatctttcgcagcatctgctgtaatccagtaaaggaatccatttctgcaatttgatctgcgcttttcttaatggcatccagctggctttttaacgaacttgtcgctgattttaattcatccgaaaaagaatggacttccgccatgtcgactttgttgcccatggtttgcctcttttacgcttgcaattttcgatcattattaatttgttcatcgagtttcttgatggctcccccggtgttcttaagggtctgaatatctgcttccagtatgaaaaatattttacctatctcttaaaaactatataaatagcggattatagacattaaaccaacgctcaacgtgttgttttttagaatcaataaattatcaaacattagacacgagcagtcgcttttttattatcatttttcttattatctcctttacaacttgaagccggatataaattaccgtgtggatcaaaattgaagcttttaaaacggaacttacagtacaaaatgactaattgctcaggaagaacaaacatcgtcataaaatatattaaaaaggctaaaaaaatcataagcatgtcttcactatcaaaagatattacagtttttaataaaaattggataatatagccaaggccaatgcatgcaataaggattactgcaaaatgagatttaattatatttccaatattacttcgggcttgctgaacgaatcaannnnnnnnnngagaaatggaagacacaggtggaaaacactcttcgtcagtttgtaaaatgggtggcaggagattctccgcaatctttacaagagaggattataggaagtccttctcggtgtattcggtggtcttccgggattagaggaagactttaagccgttttatccaaaagccgatgtacagcgttgtgtgttcataaagtacggaataccttacatcgtgttcgaaaaaaaagatcaatttgaaatagcagaggattttaaactgatttaccgtgcgccgataagaagttcgcgttacagatgtttcaacagtttgagacgaaatggtccgacaaatacctgagagcggtcatattagctcgtaaagcttttctaacgttgtctaatgccctgatcagtcatttggactacatgaagcttatcaacgatagttttgcgtgtactgttttgaccgcatctttgtatggttgccacatttctatcgtgatgtactcgatgtagtgtttatcactgatttctgataatcgctgaacaactgtctctttattgagattctgttgaatgtcataaatagtgtgtttttcaacattggttagtataagacgtggtcttcggatgatgtgtatttcttctatcccaagccacccaggagtttcaaaattatattcacgttccttgcgcagaacatcgtctttaaagatttttctgtctacaccaacgctttctgcaacctacacaaaggtcttgcgttgattcttgttcgatggcttaaacgatccttttggtcatcttacgcttatcatcaacactgtctaaaggtttccagaaggtagagccacattaccggcacttttaaagcttacgttttatctgctggccgaagcaatttaaacgaaagagtttattaggttggacaagcgcgctccagaacaactgctaacgaaccgtaacggtccttccttcgtttcttctccactacctccaatacaccgttcatgaaatccaagaacaaatccatgatgccttatgccgcaacgtcaaaattttgtaacactgaaagcgccaacttcgaatagacgcgctaactttccgcagattaagcaggataattttcgcttgcgacaaggaaatcttcgtcgcttccgaaacgaaaaagtatcttttcaagttcatgagctacatgctatataaatttgcttatcatcataattgttatctcttatttttataatatgaaaagctgtattaaactagttacgtagaaaggttgaatagagtgattcnnnnnnnnnntttactcttcagaactgtaacataagtgctgcggttgccgaccgtatgacggaaggtgttgaggccggtgatccaactaaggtaagggggatcctttgttatcacaggttgggtgttagacataatggaatgaaaaactgcaatatagaacggagcaaaatggttaacttgaatgtcatcctctgttcgagacgaaaaagaacgaaaacggcatatttttagcatgatggccgcgatctcctcttaaacgtcaccggcccggaatttcccgcaaagacaaaacgtggcaaactcccgcgtttttccattcaaatcatcatatagaaagaataacctgaatccgtgacgaaaatataacaaacgccgttaataggtagatttcccaagagtaaggatatagtggtgtccgactattcgataaatgcacttttagtgattcagtatgtaaaaatttccctgtttcattcgtttttgtgcacgccaaataaatctgcgaatttccattttttgcaagttttcgttttttatttcttttttcctagtagtctaatgatcgggatgtttagtaaaaggcttgatacaaacgagtaaagaccggtaaccatttgttggtctccgcgactgttttttgcaagaaaaaagtgcagagtattgcagtatataaattcgtttataccgcataaaaattcaatctgaattctcgctattaagggcttgacatggagcctctgcagccatgattcttttgccaagcggccagctgtaacagatttggcaaacccaaacaggttatcatggctacccctccatgtaaagcccctctgcataaccatttgcatagaaattttgcacatctctgcactttaattttgcaataaacacgcgacttttaatttccattgccggccacggaaaaccagctttgaggccagtgtgatcatattctggatgacggttcggatgcttcttcttgttgttttctttttcaatggcgtatcttgttttttcaagctttcttgtccaatcaagcgaagcaggttnnnnnnnnnntttctattgcaaaatacacagattggagcgttaaccgaacaaattcgccaattaacaaaacttttatatggatctaaaacagagaaataaaaatacaatgtgcccgatgggcaagcttccttatttgaggatggcccttcttttaatgatcctgagcatacagaaggacaaagccaacagacgattttttaaactgttgtacggaaagcaaaaaataaaaaaagaaacgaatccttgtgtgatgacatagaagtagaggtcattcattctcacccggaaagtaggattcgtaaccgttgtcagaaaaaatgttcgaaatcggcagcactctcgtacgtgaagaggtagagttcaatactgggatgacttattctaactcgaaaggcaattcaagcatttgcctccgagtaaacgaagaaaaaatcgccactcgaggccaattgtcgaaaagtttctggacgggtggaaaaatcgtcattttaacgaaagagcgcacttacaaaggcagcagaatacatgctcaatagagtgaatggactaaaagcgtttttgaatgatggacgaattgaaatagataataatctagctgaaaacgccatccgtccgaatgtcattggccgaaaaaattggctgttatccgtatgcgaggccggtgcaaaagtaaacgtcatctgtttaagtatcgcagaaacggcgaaaacaaatgggatagtttctattggtaccttgtgaaactactaacggaactaccgaatttagaaattcatagaaatccggaaattttaaaccaatattgtcttggtcaaaacgatccaggcagtggaaaatatccgttgatttgcaaaaaaatccatgataagcggctatttgtgatgcgtaccgaaaaggtccgcttatttttatataagtagggcttcctgaaagaatcatttataaaaatttaatcagaaagctctacttcaatatttgtcaatcggagagatatttgcaaggacaggctaattttctcttcttcctccattaaaatggcttccgagtccagagttttaaaccattgcttttaaaatttcgttaagagcctttgccaaaatnnnnnnnnnnatatgaaaaagcgaaaagctttaccatggctttcaataattaaaacatggattcataaaccaagggttgtagaatattcgcgctataataagtatttaccgggaagaattaaagaatttttgttggtagataatttaattattcgtcgaaaacgattagaaggtctagctagtttattagtttctcatgacatgaagaagattaatgaagagttctatgaattaattgcacaggataagctacctagtgataataatccttatgaagtggactggagtaaatacgattcattagctcctagagaggaggctgtcaattgaaacaggacattaaagaattatgtaagtcattgaggttagcttatgttgcggatgtatacgagcaaataccgtttgaaactccagaacaatacttgtatgggctacttcaggaggaaataagattaagagaaaaagcgagagcgatccgcttgataaaaaaggcgaagttcttagataaaaagagtttacatgattacgagtggaccgaacaacttcggttccctcctcacttaaccaaagaggatttgtgtagcctacaatttattgagaatcgagaaaatgtagttttagttggttcacccgggacaggaaagactcatttagccacaggactagggagaaaagcttgtgaactaggttatgaggttcgtttttaccgtgttgctcacctagttgaggaattagagcaagctttacgtaacaaccgtttatcagcatttagaaaacggatggagaaggttgatttggtcattttagatgaaatgggatacttaccatttagtaaagaaggagctgaattattattccaaatcatatcggagttttatgaacagaaaagcgtaattattacatctaacttagaatttagtcaatggaaccggatctttacagattctcgattaacagcagcgttagtggacaggctaattcatcacgcccatatcatctcttttcatggcgagagctatagactgtcccacgcattgtcgaaaaggaattaaatgggtggcaaacctctgcatttttaattgcatttctctgcacttttctattgcaaaatacacctacaatttgtcctgctagttatatggattaataactgcgttaaggttagctttgcacacaaatgggataatccaacaacgtatacaaacatnnnnnnnnnnattgagccggcaagcctatgtattttttcttgcaattctctgcactttttgcttgcaaaaaacacatgccgatgataccgaactcaatacagcaacaggcatgatgaaacgatcaccattttatcggtacgcatccatagggaggattttcaaacgattaatttcgaccgcattgactgctccgatgccattgaaagctttgagcataatatgcattttctcaaaacaaaagggtttcaaaaaggtaaacaaattaaacctgtctgagtgaaagacgagttttctttattaaggtttattccaactgttcaggttcagaatcctcgaaggtagcaaaaccctactcataaacattgataaatacatgtgtttcttcataaaaaattaacaaaggtgatgtatgcttgaagtaattttaattaaggaaaaggtggaaaatagttggttaagaaagtttttattggcgtatttcttattttagcagttttttctgtcggacttacggtctataaagaaacccatcatcattacgaatctttcacacgagaccacctcaactcggatatgccaaatgccaaaaaggcaccggaacattcagctgtgccgtcaaatgggcaaaatgaaagcgttgtcgttagacgggatgtgggaattgacatcgggaatatcgcgccggattttacactacctactattgatagacaagatgtacgtttatcttcgttacgcgggaagaaaatcattctaaatttttgggccacgtggtgcccgccgtgtcgtgaagaaatgccggatctagaagcgttctattctaagcatactaaagagaaaaatgtggtggtattagcggttaacttaacctccgctgaagcaagtgttggcgatgtgaaaaaatttataaagaaatacaaccttactttcccggtattactcgcgaaatcggataaattagcggcccaatatcaagcgttcactataccaacgagttacattattgattcgaatggtgtgattaggaataaaagaattggaccgatggaccagaaatggatgagtgaacaaatcgatgccattcggtaagccattcgcgaaagaggatgtctgatggagaataacgttgtgttggtgattgataaagatcctaagacccaaaaaatattaacctatcatttgaggcaagctggatttagaccgctatcggcgtatgatggttatgagggccgaaagatgtttttggaacaagacccgtgtttaatcctccttgaacagcatttaccaaagcttgatggcaatagcttatgtcatgaaatcagaacaaaatggaaaagcgatatgccgatcatatttatttctgctatatcggagaaaaaagagataattgaagggttaaggttaggagcggatgactttgtaacaaaaccttttgacccggaagaattgatggcaaggattcggactgtcattcgccgggcgggcgagcattgtctgaaaatcagttatttcggtctgacattaaagcaaagaaaaagggaagtttggttggaggggaaaaaactacaacttacaaaaacagaatatcgcctattatattttttaatgaaaaatcccaatcaggtactaacaaggcagcaacttattgaacgcctctatccattgaatgaaaagcatgtgtatgatcggacaattgacgttcacattaaaaaattacgagaaaaaattgagaagcgcccgtcttccccaacgagaatcataaccgtaagaggacttggttatatgtttcaagttgatgaagatttttgaaaagaaaagaggtagaaaaatcatgaaatataaaatgactgagaaaggcttctcaagtgattttgaatatgggactttgaatatttcaagcgaatcagaatatggattccgccccttccagttgcttgtctcctcgattgcaggttgttcaggtggcgttctacgtaaagtcatgaaaaaaatgcgtctcgacgttgaccatattgagattgaagcaaaggtgacgcgcagtggcggacaagtcaatattgtgaaaaaaatggaactgacatatgtcatatatggccgtgcattaaatgaagaaaaagtaaaaaaggcgctggatgtagcaatgaaaaattgcgcaatggcgcaatccgtcaaggacgccattcaaatcgataaaaaagtgagaatcgttccatcgaattagacgacagaaggtgaaaaatcaatggatttaacggtatttctagcgttcggcgcagggtttttatcttttatttcaccttgttcactgccgctttatcccgtttttttgtcatacatcacaggcgtttcggtcgatgaacttaaagaaaacaatggtttcattaaaaaaagggcttttcttcacacattctttttcctcctcgggttttcgatcatctttttggcgttaggtttatcaacttccgcggtgggaaatctcttttttaagtataatgccgttattcgtcaagtgggtgccatcttgattattttctttggtttagtcgttcttggcttttttaaaccggcatttttgttgaaggaccggaaaatcacctttagagagcggctatccggctatgttggctctattttaattggaattggaacagcagcagggtggacgccatgtacaggcccgattctagccagtgtcattgcacttggtgtgactcacccaggacaagggctcatttatatgttgttttatgttttaggttttgccgtaccatttgtgatcttcgccttttttattgggcggttcaacgggatcaaaaaataccatcttaaattaacgaaagttggcggggccttaatgattgtggttggtgtattcttatattttgactggatgagtaaactttcttcctatttaacgcaattgtttggcggttttacaggattttaatctatacatcatccttgcagggtaatgcagttgcatcttcataccccatagggtataatgggtagggaaagcgggggtgagtatgaaaaagctttgggatcaagttaaaaaggtttggcagtccctttgattttccaaaaagatactgttcctggcaggaatggcttatgttctgtatcgttgggttcatcggttgttttgatcattgaaaaacggagggtatttaaatggctattgttaatgtagacgatacaagttttacaaacgttattcaaaatgaaaaattcgtattagtggacttttgggcaacgtggtgtggcccctgtaaaatgatggccccggtcctagaagaattggcggcggattatgaaggacggattactgttgccaagttggatgttgaccaaaatccgcagacggctgccgcatttgggattatgagtatcccgacgatgatcgtctttaaagaaggtcagccggtaaaacaacttgtcggttacatgcccaaagaatatttggaaacacaattaaaagatctcttttagtgccgacgcacttttaatggacacttcatcatccaatgaccgcttgttataggaaaaatgtttcacattgatgaaggggttatgccaatggcgggctgtaaaattaaaaaaacaaaaacaacaaaagaaagaggtttcatggcggtggctttcctattaagctttctagtcactgtgtggatgaatacacacaagccaattgattcggttgaaaaagaagaatcggctccattaccgaattttacagcaccgcctttttctttagaggatttacaaaacacccagacatttaccttgggcgcagatatgaagaaacctgtgattgtcaatttttgggcatcatggtgtccaccgtgtcgaagtgaagctcctgaactagcggcattttacaataaaaataaagaaaaaatcaatctttatgccgtgaatgtcacgaaaagtgaccgtttaaaagatgttcgggatttttctaagaagtatgggttgacgtttcccgttttattagatcgagatggcacagtaagtcagagatattgggtgacaacgatccctaccacattccttatttctaaagatggggtaattcttgaccgtcatattgggtatattagccagtataagttatatcaatatttaaaccattctggtttgggtgaatgatatggcgcaatcgatcatgttagggggtttagcgattaataaagctgttctcgtttatggattaggttttttattagcctacctcattttacggaaacaagatcgccaactcttatccctcttaagttatatgattttaatcacattatttttttatcgatttggcggcttttttttcgatccagggatgtatttgaaaaatcccttattatttctacaagcaaatggcggtacaagagaatgggtaacggggcttttagcggcaatgatgtatgtcatggtgatgaaaaagcggcattccttcggcatcggaaaattagccgacatcgccgctgttggttttttcattataacgtttgtcaaaaacctttttttcccgattttcggggataaaacttccttgccttggggaatctccataaatgatggtacgcagtcataccaccccattaacctgtattattgtttgttaattttaatattggcttttattctttggaaaaggcatgatgcttttggtaatggtcgttattttacaaacctcatgttttactgaggatttgggacgatgctcatatctcacttaaacagccaacccattacgtttctatatttaacaaacgaccaatggatgtctgttttgttcatgttggcaggcggattattcacattctatacgaaaggatgtctagttaatgagccatcatcggtttgaccctgagaaagcgagtctcttgctcaatcctgaaagaaaagaaaaattaccaccggatcaaatattagccctcctcgagctgaaaaaaggggatattgttgcggacctcggttccggtaacgggttttttaccattcccatagctcaaaaaactgaaacgacggtttatgccgtcgatatagagccgaaaatgcttgacgggcttaaagcttatgcgagtcaggaaggtgtcacgacgattcgtccaattgtttctgatttaaccgaaatggccattgctaaccaagccgtcgataaaatttttagttcccttgttatgcatgagatttcggatttagagaaggccattcaagaaatgagaagaatcttaaggcctaatgggaaacttcttattttagattgggaagccgttgacatgaatgagggaccaccgctttcggtaagaattccttctgacaaactcaaagcggtttttgaaggccaaggtttttatgttgaaaaacggaagattaacgaaggcatttatgctttaaaaatgtccatgcttgaaaaataaaggaggaacgacgcaatgtttcattataccgtcaattcatctaaaaatttagaagaaacgattaagtccgtcagcgaaagtttaaaggaagaggcgtttggcgtccaatgggaatttaatattaatgaaaaactcgctgctaaaggcttcgaacttgacggtcagtatagggttttagaggtctgtaaccctaaagaggcccatcgtgtgttaagcgctaatcctttggttagctattttttgccttgtaaaattgttgtctacgaagaaaaagatagacaagtcaaggtaggtatgcctaaaccgacggcacttatcaatttggttgaagatgaaggcttgaaaaatattgcagccgatattgaaaagcgcctcattacttccattgaaaaaagcgtttaaaaattgggggggccaagtgcttgacgggtctacccccatgcgtatatagtagccttgcaataaaaataaagtggggattcgtatgcagtatgatactaaaatcaaaaatcgtatgaaaagaatagaaggacaagtacgcgggattttaagaatgatggaagaggaaaaggactgtaaggacatcgtcccccaaatggctgcggtccgaagtgccattgataaaaccattgcccttgttgtcagtacgaatttagaacagtgtattcgtgctcaaatcgaaaaaggggaagggacagaagatattattcaagaagccgttcaactccttgttaaaagtaagtgaatcttcaacaatgttaaatctaaaaggcgctttatttaaggggcgtgcaccgtcttgtaaggaactttttgtgtttaaaaagaacagcctgaaaaaagagccccttgacatgactttggtcgcgcgttattatataccccgttgggtatttaacagcattttttaaatgtgtgtataccctatggggtatgcagaagtgctcgttcatggcttttctagaaaggtggtgacaaacgtgatccaacaaattcttcctgaagaactttataaaaaaataacaaatggtgaaacgataagcgtcattgatgtacgggaagatgatgaagtggcacaagggatgattccaagggctaaacatatcccgttaggtgagcttgagaaccgtttaaatgaattggacaaagaaactgaacatatcatggtgtgccgctctggggcacggagcactaaagcctgccaaatcatgttgacaaaaggttttaaggttaaaaacatggtaggcggtatgattagctgggaagccaaatacgggaaatcaatggttgttgattgaggtgattcgtaaacatggaaataaaggttaaccaggtattggatgctcaggggctctcctgtcctatgccgatagttaaaacaaaaaaagcaatggatgcgctcgagccggggcaagtgatcgaagttcgggcaaccgacaaaggttccacagcggatatccaggcgtgggcaaaaaatgtcgggcatcagtatcttggtacgcttgaagacggagaggtactaaaacattatttgcgtaaagcctccgcaaaagaaacgaaatcggaagctaaacacccctttacaatcgaccatcgctctttgaaagaaaaaattgaaaatcaggaagagatgactatcttagatgtaagggaaccagccgaatatgcctttggtcatattcccagtgccaaacatatacccttaggcgaattggagaatcggctgaaagaaatagaccctaatcttccggtctatgttatatgccgttcgggtcatcgaagcgatttggtctgccaattactttccgaaaaagggtttaaaaaagtcttgaatgtcattccagggatgtcagaatgggacggacctgttgaaaaataaacactttaataaatggaggtatataaatgacaaaagtagcgattattgcggcaaatggtggattatttgacgcttataaggtgtttaatattgccacagcagcggctgcttcaaatgccgaagtgggtattttctttacgtttgaaggattgaacctgattcataaagaaggccataaaaatttgcctatacctgaaggccgcgaacattttcaagaaggttttcaaaaagcaaatgttccttccattgaagaactcatagagatagccaaagaccttggcgtaaaactcattgcctgtcaaatgaccatggatgtcatgaatctcaaaaaagaggattttattgacgggattgaagtaggcggtgcggcgaccttcatcgaatacgccaaggatgccaatatcactctaagcttttaagggaggcggtttacagcatggctttaaagaaaatgacaccacaagaattagcacaagttgttattaacggggagaagttatttatcctcgatgtgagaaatactgacgaatttgatgattggaaaatcgaaggaaaagggatagacattattaatgtcccgtactttcatttattagacggcgttgatgggattttagaagatctcccaaaagaggcgcccatccttgtcgtctgtgcgaaaggcggatcctccgaatttgttggcgaacaaatcgtggaaaaaggatttgatcaagtcttctcgctggaaggtggcatgaaagcatggagtgaatatttggaaccagtaaaaattgccgatcttccaaatggcggaagcctttatcaattcatccgcttaggtaaaggttgtttgagttatatggttgtatctgatggtgaagcggcagttgtcgatgctgcacggatgatcgatgtttatgaaaactttgcgaagaagaataatcttaccatcaaatcaattattgatacacacctccatgccgaccatatttccggaggcagggcgctcgctttagcaactggggcaacgtattatctcccgccgaaagatgcgacggaagtgacgtatcaatatgagccattagaagaaggtcatgatattgttgtcggccattcgacaattaatgttcacccgatttattcacctggtcataccattggaagcacgtcgcttatcattgatgacaaatatttattaaccggagatattttatttgttgaatcgatcggtcgtccggatttggcgggaaaggctgaagactgggtatccgatttgcgcgagacactttacaacaaatataaaaatctgtcagatgatctcattgtcctccctgcccacttttcacatattcgcgaaatgggagaagacggtgcggttaaagccaatctcggtacactttatgaggtgaacgaaggtttgcaagtgaaagacgaggagactttccgcaggatggtgacagaaaatcttccaccacaacctcatgcttatcaagacattcgacaggtgaacatgggtaaactcacgcctgacttggatgaacaacgtgagatggaaattggcccgaaccgttgcgctgtacatgagtaataaaggggaggggtgacagtggaatctgaaaaaatcttagatgctaaaggactatcttgccctatgcctgttgtgaaagcaaaaaaggcaatcgatgacttgcaatctggtgacatattggaagtccatgtcacagataaagaggcgaaaaacgatatgccggcatgggctaaggcgagcggacaccagcttgtaaagcagaccgaagaaggtaacatccttaagttttggattaaaaaaggttaagggtgcagttttttgcaccctaccttttaaaagaaggggagagtatgtcttttttattcatccttttattatttttcctcggtttcattgggtcgtttctttccgggatgcttggtgttggcggtgccatcattaattaccccttaattttatttattccgccgctatttggtctaccatctttttctgcccatgaagtttctgggattgtggcggttcaagtttttttcgcgacgttaagtggcgtattggcttaccgtaaaggtggttatttaaataagaccatcattttggtgatgggcagcagtgttttaacgggcagcttggtcggcggtttcggttcccgatacctcacggagaatatggtgaatgtcatatatggggtgctggctttaatcgccgtcattctcatgtttcttccaaaacggtcgggaaaaaacgaggaggaagcatcgtttcgctataataaaccgctagccgccgttttatcgtttttagtcggcttaagtgcaggtattgtaggggctggtggcgcttttttacttgtacccattatgatttccgtccttggtatacctatacgggtaactgtagcaacatctctagctgtcacctttattgcttccatcggaacagttagtggaaaacttttctcacaccaaattgcttttctcccatcacttattgtcataatagcaagtcttgtcgcatcgcctctaggggctaaacttggccaaaagcttaagccttctctactaaagtggatttttgctggtttagttgttatggtcgccattaaaatatggagccaaatattcaatataaaattatatggggtgatgagtatgcctaattggcttttttacattgtcattatagctgtggtcctgtggttagtattaaggcgttttggtggggtaaaaggtgtccaaaccatcacggcaagtgaattaaaaaaccaactaaaagataaaaacaaacaatttattgatgtgcgcacgccgggcgaatataaaagccggcacattcgtgaatttaagaacattccactccatcaattgcctcaaaaggtcaatcaactgtcaaaagataaagaggtcgttgtcatctgtcaaagcggaatgagaagtgcgagagcttgtaaaatcctcaagcaaaacgggtttgaaaaagtaactaatgttaaaggcggcatgaacgcttggtaatgcccgtttttaatgtttgtctttcaaatcagcattaagataaaaacgctctgccagaatcaaagtagcctggcagagcgcagttttttaaaacggtaagaccaataaaatcactagcttagaaccaccaattgtaggtgaatattaatttacgttgatgctggtacggctaaccagatgtgcttgggcggcagcttggccaatgaccagactaccgacgatatttagagcgggaccgatcacccctggcacaaatgcggtggattccaaaaaaatgtccagcaaaacaaacaaggcgaggacttcaaccaagaacggataggggaccgttgctcggtcactagcgataacgagacccagattttcggggattattcccgtattgacagataacagagctacaaataaagaaggggcgtataaggccaacaataaagagaccaaacggatcaaacgaacaaacagaggaataatgctcccctggttgaggtactctgccgcttgcatcatattgaccatcacggttggcaaaagagcggcaaatggtgatccttcgagtaaaatcgcgattcttccctgattcaggaagtagacacgcggacgggaacttcagtaagttcatacagcggaaataccgtttgatttctgcaaatgatcagttccatcaagtccttgtgtccgacgatgcggtcaatatgtatttttttgagattcgttgaaatttccttgacccaatccggatttgccacatcacgcaaataaactagtgccaccttgctttttgaacgttcgcctgcggtaaaataggtcacagtcagattgacgtccttaatccaccgccgaaacaatccaacgttcgaatccagatcctcaacaaaactttccttcgcccccagaaacactttctcaatcgtcggtttttcaaccgttcttgttttgatctcggcgagaggaatcgaaaccacctgccccttccacgatcgatgggcaataataacattgcctttcattaaatcggacaaaacatcttcaagtttattcagtgcttctcctctggcgaacagcattttccactaaccaggggttttggccaaacgttcaaattggggaacgatttcatcgtacaagcgtcttaaatccacaatcgtctcaagataataataaactaggtttgccgattcaatttggatggtttgcaggtcgtcgctggtgatgagggatgagaggctttcaatcatctgctcaaattttgtcggtaatggcgagttaccttcggatagatccgtagtccgggttatagaggagcccctggatttccggtttcttttcaagaatcgcattttttgtatgtgtaaaattttannnnnnnnnnctgtactatagtcaattaatattgcattttcttcacgaaccgtggtatcatacgcttgtatatacattagaaaaacctctctttcgggagagcataaaagcccccatgttcagattaagaattcgacactctaatcatagcatagggctttttttcttgcccatttttttcgacaatacatatccgtgttgcagtcgatccgtgccaaaaagaacgcacgggccaaccgcagcactccctttattccctcaaataaaccattgccagtctccaacgattatttccatgccctaattcactatgaacttggttcatgaccgcacgtgtactttcgtacaactccttatcatgctctgacaccatgccataatcggctttacgaccaattgatcgattatctaaaatcctatccatcatatttttttgttctgctgaagcaagctgtgcaaaacggtcacgtgcataggaatgtcgaaatccatgacaacctcgccctgcctgttcaatccctgcttttttacaagctgtatgaacccctttgcgcaccgtatcataagaaacagccacaagcctatctgttggttcttttcctgttaaaaagctctgtaacgactcgacaaagtctttgggtacttcaacctcacgaaatcgtcctcccttggtaatgcctgccccctttttaacaggaatatttagctgtagccctccgtttttcgccacaaaatgctccacacggatattgacagcttcttttactctcaatccaagttggctcattaaatcaacggctttcgatacttctgcagaaacttgtttttttatagcatctatctcccaacgctcatacgagcgattttgcaagctttcgtttcgttctagtacataaagacggttttctgtacaaaagcctgcaaaattgctctcaccctctttagaagccattttatgaccatgttctaagagtcgtaaggacgtttccacgttaatcatgtgccctttggnnnnnnnnnntgatcagccaaaacgccgatgcgattgcattaaaagccagccaatccacggttgacgcgcttacgggccgggtaagtacggcggaagcaacgctaaaaacgcaggcggatcaaatctcggcgaggataaccaaaacagacgcagacgcaaaatacgccacgcagacagctttaacggcgactgcgaacagtttgacgagcaatattaccgcagtgcaaacaaacctggataacttgtctgttggcggacgaaactacgttttaaattctactttagataatgttagtaactggttttttaaaaatggtgttacagttgattcaagcatgctgtataacggccataaaacattaaagttttccgctagtgatctttcgagtgatacatggttatttgcaaaacctcctttacgaaacgctaaagcaggggaaatttatagcgcaggggcatggtttaatcttaaatcaaacacaatggcaagcgatgacggtgcgtatttagtaattgaattttatgattcatcaaagactcgaattgcttattggaatattcgagccgataatacagttttagataaatggcaatatgttaaatcggagaataggactgcgccaactaatacagcatatgtaacagttacgtcattttccaaaagaaacggtacattttgggtagccgatatgaccttaaataaaggtacgaaagtttcggattggtcgccagccccggaagatatggcaacgcaatcccaaatcagccaattatccgatgatattaatttacgcgtacaaaaaaacgatgtgatcacccagattaatctcagcaccgagagcatcctgattgctggtaacaaagtccacattaccgggcagaccaccattgacaatgccgttattaaagatgccatgattgccagcatgactgccaacaaacttacagccggcacgatagacgcaaatgtgattacggttaaaaatataaacgcctctaacatcacggcagggacgctgtcagcggataggattgccgcaaggtccattgacgcaagtaagctagcaactggcacgattacggcagcatccggggttattggaagccttgatgcgtccaaaattacgaccggcacgctggacgcggcaaaaattaatgttgtaaatctcaccgcagatagcatcaaatctggaacgttaacgtcaattaatattaacggcggcaacattaatattgggggcggtaaatttaccgttgattctaacggactaatgtctgccacaaatgcaacggtaacaggttcattttcatcaagtgccaaagacgatcagggcacctgggacgcatcactgagttccggcaggatagcgatgtctaagattggggatgcgtcggaaacaggcgggcaatacgtgccaatctacgaagcaaacatatctgcgggaggaatttacacagtaatgagaagaaatagccgtccctggaattatgtacagatgtccgcaggtgccgtaggtagcaacgatacttttatatcagtaacggccaatgaaggcgactcgtcagctttatacccggagaaactggtggttggaaatcgtactatagttggtacagacgggttacaccttgatgatgatatcgtgattggatcaggcggttggagggctcttaaatttcagaccataagatataatagtactgattatccggctataactcaaaaagacggtaaagcaggtatattgtttggttccggatatatgtatttgttgtgcagtaataaggtggtaaatctagcacaagtatattggccaacaaaaattgatagctccggcaaagtagtaacttgggtcaatccattgaaataaaaaaggagaatcttaaaatggcaaaaacaatagaattcaaaaatgaagaattggcggcaatcgcaaactttttgggagatttaaaactaaaaaacaagcctagtcgtggacgatctaagttaattaaattgctggcatctaaaaatcaggaatacctggatgagagagacgaagagcgcatgccgtattttaaaaaagatgaaaacggtaatccagttgttgaagataataaatacgttttagaggatgaatctaagaaacaggagcttgataaaattttagaagatattgcaacggaaaaagccgtgattgatctaaccgaatatgccgaaaaagttgaagccctataccgtgaacttgaaaactatgaggaggtgatgaccggagaagacgcattgatttatgataccctactagaccaattggaaaatatatttgaaggagaggatgaataatgagtacatcggttagtttttcggaattaaagtttttgacagacacagaaggaaagattgtgggcggtgtagtaccaacaaccgccacgtctcaaggcgactcttattatacggcatcaggatcgttttcccttacgctcgaggattttgcaactattggattagaccttgacaagcttaaaaaaatgatgagtaaaaaagtcgcagaaaatctatcggcaatggctaccgatcttaccgctaccgcagacacagaacaaacagcatcgtaaggagttagggggtacggatccattggaggagatgactgtggatcaaagaatcgagaaccatgaagagcggatcacagcgttagaaaaaaactatgccgacctgaccaacaaaatgcaggcggtcgaaaccggccagttacgaatagaaaaaacgttgctcgtggaaggaaaagaacagaaaaagctgatcaaccagcagcgagaagaacagcaggannnnnnnnnnaggtaattgcgatgttacagactccttgtagcccaagggtttgaaaaaaggataaaaaaattttccccctaaaaagagggggaaacaagcaaaaatgataaaaaaataaggagtggacaaaaattccaccccactgaaacaaaaacaggtgaacccgtttccccagtaggttaaaatagttttaggactaacatcttaacactgggagttaacactgggaggttcacctgtatggctattataccacaaatgagtctgtttacatggaaagaaattgagattcttggagatttagaccgtcttcgccttgtactggactacatgcctgatgaagcgttcatgcaaagccttgaaaagaaaagggggaagggccgtaatgactaccccgttcgtgccatgtggaattctatcttggcaggcattgtatttcaacatgaaagcattgagaaattacgccgtgaactctcccgtaatggccaattaagggagatgtgtggctttgaagggcaggttccaacttcatatgcctatacgcgctttctaaaatccctaatccgtgacgaagaaatgatggataaaatgtttgagactttggtagaacagctcctggaacggttgccggattttggtaaacgcttggcaatcgacagcaaggcgatctcatcgttttctaaacatccgaacaagcatgaaaccgaggatggccgccgggatctggatgcaaatcatagccagaaggtttacagtggtgtgacaaaagaaggcaacccatggcaaaaagttgtgaaatggtttggctacaaactgcatctggtggtggatgcaacctacgagttaccggtaacattcaaggttacaaaagcgtctgagtcagacattacggaagggcataaactcttagagcaaatggaagaaaagcagccaaagcttctgaaaacagcggaaacgatggcgggagaccggggttatgatgacacgaagctgattacgaaactctgggatacgtataagattaagcccatcattgatattcgcaatatgtggaaagaccccgacaaaacacgattactcccgggaaaggaaaacgtcgtttataactacaaaggaaccgtatcctgcgtatgccctgaaacaggtaaacaacgggaaatgtgcaacgggggatttgagaaagaccgccagaaactaaaaaaactttgcccggcgaaacaaatgggagtgacatgtgaaggcaaggctcaatgccccgtggcacaagggctccgtatctcattatctgaagacaggcgtatttttacacccattgatcgatcgagctataagtggaaaaaagaatacaacagacgtacagctgtagagcgcgtgaacagccggcttgatacttctttcggctttgaacttcatacaattcggggaatggctaaaatgaagctgcgttgtggactggcactctgtgtcatgttagccatggccttaggccggatcaaagagaaccaggctgaaaaaatgagaagcctcgtttcttaacttatccacataaaggaaatcaatttcaaaaaaagcgcttgtggatcattggattcgtgcgcctttttttagatacatttctatattttttcaacaattatctgataacagtacattttttaagcgtgnnnnnnnnnncataggcttgccggctcaatgaatttacctttcaaccgagcgagaagggagcgactgaacggcagaaagcgcgtgccgcaagcggtagctctctcccgtaaacgcgagaatgtgggcgtgatggaccaaacgatccaccagcgctgccgtcaggcggttgtccccaaacactcgattccactgtccaaactctaaattcgatgtcacgatgacactttttcgttcataacaatcggcaatgatgtgaaacagcagttccgatccctgcttttgaaaaggtacatagccgagttcgtccaaaatcaacagctcgcatgtgtcgatttgccgtttgagccgtccgagggtgccgccttttaacgcttcttcgagctgggcgacaagatcggcgacacggaaaaaccgaacttcatggccccgttcacacgcttttaatcctaatgcggtggcgagatgggtttttcctgttcccggcgaacctaaaagcaggacgttctgtttttgctccaaaaagcgaaggtcgcaaagttcttccttcgaggtcgtggtcggccaatgaatctgatccgaccattcataatctttgagccatttcaactcccggaacttcgccttcttgatcaatcgagcctgttttgctttctgacggaacgacagctccaacgccaacacatcacgcaaaaactgttccttggtctcgtaggccacctcctcgaatcgatccgcgatgtacgccaaatgcagggctttacaaatctcttttaaatccatcttcatgcccggcttcccccttcccttgacggacaaagacgttgatcatacacatgtaaatcggtttcatagtcgactaaaacggaaggggtataggcttcttcccatttcgcgggatactccgaacgcttcgcctccatcaacaccccgatctcatggggcgtcaaatcccaccgttgatacttgtcaagccactgggcgatctcatagacggtgtaccgctccagcagcttctgcactcctcgaatgcgtgatgccgtctgtttcggttgttccatgaagtatttcctaatggcctccggcaagtaaactcgaaaccgcgaatactccaccacccggggcttttgcgcccattccgccaaaatgtccttccaagggagctcccgtcgctttttcgtgtacggccttggcgcttccaggtacacctccccttcctgggacaaaaccatgaaacgatcccattcctttttgacaaggacacggttgggaaccgggatcccatgaaccacaaacgcctccccatccaccgttacttccccgtatttattgacattagcgtggtggaaggagaagatcgggagatctctctccggcaggacaagcaactccttttgttcttcctgccataattcctcaatggttctccctttttcatagtgggggcgggctcgatcttcgatcatcttgcgatgcagccactccgccagttcttcatccccctcgatcaacggagcagggacaaagcagtgttgacgagtatagtaaactttccgttcgacattccctttttcgtgtccgctatacggattgcacgcctgtacgtcaaacccataatgaagccggaatcgctcaaatgcttcagtatattgacgttcgcctccttttcgaatcgaaaccaccgccgccgccaaattgtcgatgcgcagttttnnnnnnnnnntgtccgcagccaccttcaatgtcggttgtatggccagtggcagtgacggggcaactgtctatcggccacccacaatgccactggcatttggaaaagacaaatgaatgtcggagatctaaaacggatgatccccgagtaattccctcaattcctttttaagcaaggcattcaattgatttaaagcatttttcatctctaataattcgcttatttcctttcttaacccttcaatcgtagcttccatctcatcaataccatttccccactgttcataatactgggtacactctttacagctcattgatcacccggtgaatatgagattcacccacgaccttatttccctgtataaaggcatccagcaagctttggctacaaagtgtgtttacctttctcggaactccctggctgaagttatagattgcctgaatcgcctcttccgaaaagacctcatgcggtgtttccaccaccctcaattgatgcccgatataatcggctgtttctctttctgtcaggctactcatttggcagcgcatctggatccgttggtcaatcgcttccagatgctttactttcaatagattccgcaggctgggctgtcctgccacaatcagggataatggagacatggagtcttccctaaaattgaggatgaagcgcaattcctgcaacatagagtcagagaagtggtgagcctcatccaaaacaatgacaatttgctttttttcattttcatatatatccagcatcaaggactgatactgccgtttcacatcatttgaccgaaaagcaggctgtattccgaagttctgcagcacttcacggtaaaaaagctttggtgtcaaagaagagtcacatatataaagataatgataatgaatagggtccaggtgatgaaccaatgagcgaatggccgtagatttccccatgccagcttcccctgtcagtaggcaaaactggcgattctggacagcatattccaaccgtgcggcagcttccttatggctggaggaagcaaacaggacatcaggcgcaatttcacgggtgaaaggaactcctttcatttcaaaaaaatccagcatccgttattctcctcctgtctgtttctcttttaatctcgcaaaactggtcgtgcccacttgttttcgtttttcttcctcctgctgtttctttaactgttccaagaaactggaaactcccgcgggagtacggtcatggtccgcatcgtccggcaatttggaatggctttgattgtggagtaccgcaggcttcgcatcatcaaagcgctcgtcgtccttccatatttgaattgtggataaatcaaaaggattatagcgtatctgaattcgtttccctcgcaaggaggagtccacatcatattgatttccttccagttcaataatggccgtttttcgaaccgttctttcttcttcccaaaggaaaatattctttaacaattcggcgggcaggtgacgggtatgatcttccttcgcttcatatcgctttttaggcgtttgtttcgtactgcgatggatgcggttatcatatgcctccagccaagaccttaagtactcatttaactgtttcaatgtcgtgagcttctcctggttaattaacaggttggcctcctcggtaaagctactgtctacaaattggaaaaacttctcaatttttccttttgattctggagagtaaggttttgcatgaatgagcttcgttcccattcttgcgcacataatctgaaactgcttggcactataaacggatccattgtcacagaagaacagattcggaacgccaaacttcaacacagctttttgaacacagcgttccaggcgcggatatctttcctccaagaaaaactcggcatgcatgattctccggctatggtcatcgatgatcgcgataagatagaccttttttcgcttttccggatttttagggtcgggcagatagagagtgtgctgtgtatctgcctgccagcagtcattgggcagatcatgttcaaattgtcggaattcctttctaactttggagtagatatcccttttactccaccccatctcctgaaagtaacgcgacagggtccttggtttgatggccccaatcggggctctcttctccagctcaagaattcggatcacctgttccacacttcggctgggcaattccttccgcaggtcaatcgcccgcttgagcacttccggatcctgattccgaagactgccctgacttttccgctcctgtggcttcaagccttcaaatccattttcttcataagcttggagatacctctcaagggatcggatactcaccgttgtcctttcactgcccggaatcgtgtaccgttggccagcaatttccctcaaaagggcatacctctccccgggcttcagctgccgttgaacgattggggcaattaaaccaaatcgaaaggcagccacttcatttcgcagcgtctcattcatctcattttctcctctcattccataaaatagaaaacaacctccattttccccgacttttaacctcggggatagagacagattttgtggagcaagaaaatggaaaataaggaactaatatgtaaatggtccgacatggcctttgaccttaattgtggtagaagggctggcggagattgatcgtagaaaatagcctccccttagaggggacagatccaatttccgcaaaaaagaaggaaagaagaagctgaatttcctcatcagaacggattccttctcggtaaagggatagaaaactttccccttcttgaaattcggatgcccatttcttccgttgatcaatccaccatttcccccaaaattccagaaatcggtgtttccaacggtataatgtttttaaagagacctctgaaacagaaggagtcgtcagcctttgggccaactggccaataggcacaccttccatcagccaccttcccaaaaattcataaatatgattcgcgaaccgtgcccatggggaagtaaagcaaggcattaatgaaaaggtttttctacaatccgggcaccttctgcgcatgatgggtatacgaaaggaccggtgtttgaagtgaatggtcttgttatacttaccgtgctttctgagttttcttccacaacacggacaaaagacctcatcattgaaggtttcaacaaattttatatatctcttgatagaaaggggacattctagtaaaataggcattgtattgggagggttatttgttctccggccgccaagcacaggaggagcaagtaaccttttccttttctagtttaagagccgtcagctctattgaccattataccatggccaatagagctgacggctcttttttaaaatatctcccgccaaaataaatgtcaaaaccccttgcgatagcgacattaggcatggctgcgaacacaatgtcaagcgaccagcgatgtcatgaaaaatatggcatgagatcaaaattaaatttcacttattggtgtccaaaatattgacttaaatccattttttaannnnnnnnnngaacagaccattgaaagtatctatgcggaagtcggccgcctaaccacgcagttgtcgtggcttaaaaaaaaatctggaattaaggagtagagcagaacgagttgaaatggtcgactgggatgacgaagcaaaactgccaatttccatccaggccgatcttttgagcctgaaccgttcaagcctgtactacaagccagtcgggccgtctcctgaagaattgtttatcaaacatcggattgatgaaatctacaccaaacatccctattacggctccaggcgcattgctgctttactgaatgccgaaggtttggtcatcaaccgaaaggctgtacagcgccacatgagggaaatgggaatcgccgggatcacacctggtccaaacctgagtaagcgcagtcttgaacaccgaatatacccgtaccttcttagaaacttgaagattacacaccctaatcacgtgtggggtattgacattacttatatccggcttcaaaaaagttggatgtacctggtggcgctcattgactggtattcccgctatgtcgttagctgggagatagaccaaacccttgagatcgactttgtgctggaagcagtgaaacgggcattcttagtcgccaggccagagatcttaaacagtgatcagggcagccattttaccagtcccaaatacacggatctggtgcttgagaacacgattaaaatcagcatggacggcaaaaaaagagcccttgacaatatcattaccgaaaggctttggcgaaccatcaagtatgaggaagtatatttaaaagaatacaattcccctagagaagcaaggaaagagattggtaactttatacaattctataatcacnnnnnnnnnngttttatgggtccattataaccagctgaggattaataccctactggtggcttatttttatacagatgagttatacaaatatttatacaaatgtatggacaaatataaaaaatagggatatactgattttagcgaggtggataataatggatataaaaattgatgccttaattccatttgatacattacagacagatttggagaatgtattttcggttgttgaaaaaaatgggaaggtagttctgcttaaggataataaacctgtttatataattttgaaatatgatgcctcccagcctaccgttacaaatacaatctcaactgaaactgccagctatacactccaggaagccatgaagattgttttgtcagaggccgaaaattacactatgcatgcatctaaacttgctgatgaaatatatgaccgcaggctgtatttacagaaaaatgggaagaaagcacagtatactcagattagggcaagatgtgggcattacccggaattattcgaggctcttcccggtaactatatcaaattaaaggaaggtgtagagtaatgaaaggtgaagcactatggaataccgttatctcaggactttcatcttcgggagaagaagtacagactacaaccggtctttggtttacagcatcatcccgtgatggaaggttgtacgttggtagggctattgacaacacaccttccagcgaattatcgatgcaaagggcaatatcaaagagagatttcttatttgttcattcatattatgatcgctgggttaatggggaaacgggagttagacatgaggtcagtagaaaatcaagaaataccgcttatatttttgctttgatagatagatttagtaatggttagagggtggaaaattgttaataaagaaagaaatcacaattcaagatatccaaaaatgtattgccgggaatgggtggagctttggtaatgaaatactatacgaaatgtgccgtaaaaaccctgatcacaataaagctgatgttattgtaggcaaaatatggcttattgggagatcttacgcggcggctatagaaaatagaaagacggaaaaatgttaatgaaacagattctggagatgatttctattttaacgtagttgcacccaagatgttgaaagctggcgaagaattagatatgcgtatcaatgaactcaagaaatacgataccatcactatagataatttaaaagaaattatagacacgcatttatttcttaccaatgtcttttcggatatttctggtcataataaccgttcgctggcatcaaaatatctacattttcatgtgccgaatatgttttatatttttgatagtagagcaattcaaggggcaaaaagctacgtaatgtcggataaacagcttagagcttcacttgctccatttggagataaagaatacatagaacttgttattagactttttacattccaagaacatgtgaaaagtcagtttgggatgacggtaacaccaagagttattgattcattcctattaaattattagagggctttataatggtaactaataacggtttctcccatcaaaatattgttcctattgataaaaccgcttcaaagcagcagctatataagaagttatgagcctctgccaaaataaaaatatacccttgagcgaggctctggaaaattaattatcccgatttttttgccttttcatccagattttcaattcaaatagaagtaaaacggtcatttttcttcaaaaaaagggcatacgtatcccgccttcacaaaatggtttttttcactaccctttgtggaaagaaaacgttcatttgagttattcatatatccacctgtgaataacttaatttgctctttgcagtcgattgcgtgtccatccacaattggcctttccagtctgatggtacgccatatttgccatgatatgcatagatatcatgcatcgatctacatgagcttcaactgcctgcttcccacgcttgtgaacacgacggagactgtatccgtcttttagaataccaaagattctttcgatgatcgtcctggtactatataacacttcaaatgtgcgaccatgttgcggcaactcgacatctacttgaggcgtttgatcaaagtctatcctaaatactcttccttgtgctgccccattacaacattccgcgtgattcgctagcgggcaggtgagaccttcttgcttggcatttggatgaaatacaggacaagtgtaaatatattgccccttttcccgatcagatcctctaagttccattttatgtccactgatacagatgggagtgccgtaccggttgattttttcaatcccccgggcgnnnnnnnnnnttcagccggaaaattttccccatcagtcaatctcctttctcgtccatatccataatcccggttttcatgtcataacccccgtgccaaatataccaaccttccgaaaccttctctagctgattttgattctcttttaaaaaacggctgtccacatattcatttacagcaaataactgtgcttcacgataccattcctttgttaaatacggcgcttctttatacatccggattaatctttcaatctgtccgtcttcaccctggtaatttttgcaaaggatggacaccgtattctgatcaatcatttgaaacaagcggtccgctgtctcaaacgaaaaaggtttaaggtttgttatcccatatgaatccagcaaatcgtctgcaccgaaggagtacaagctccgaaaatatttttcgaaaatccaaggatcatgcaatgcagcggtgctgtagtgatccaataaaatccttgtttgctccgttcctttgcggtacattccgccaggcatcccccctccaatcaattcgaaaataaacactgcccccttttccagtttaccttctctattgctccttccagcagcctggacaatcgagtccaaaggggccattgcgcgaaacactgccggaaaatcaaaatctactcccgcttctaccaatgacgtcgcgattacaaggatggacttttcattttttaaatcccctttgatttgttcgatcaccttttttcgatggtgaggacacatgcgattcgataaatggtatatgtgctgtccgttcagcttttgatggnnnnnnnnnngtgtggattgaaatttaagtaagggacgtaacagaagaggaattggggaaagtgttggaagaacagcagcagcaaaaagagcagcgaaaaaaagaggaactgctaaaaattgagcaagagcaggcgttgcgtgaacaacaggaagcagaagcccgcttggcggcgatgtcgaaggaagaaagattgctctttgccatacaatcattaacagaatcacaagcagacctggaaaaaagcaaatcggagttatatgaggaggtaatcgctcagcaaaatcaggaagctgctttagccctccgacaatattgggaaaaaacaggccagtggaaagtcaataagaaaaagaaaaaacagtatgataaagtcctatccattaaaaaactgttaaatatagagtaaaggcacgggatcactgtaaacagcttttttgatgtaaatagcgaaaggaagaaaactcttattcaagatttcttccttttttctatggaaaatattcagctgcttcaaatttatcggcttcctgccaggctgggagtatagatatcatatctataaatgagcacccagggagctgatgtagaatacatttgcatcttttccagtgtggtttttctttcccatatcttagagcttgctgnnnnnnnnnnaatagtgaaggttataaagaaaaccatttacttggtcttggcaattgcattaattttaccagcacttgttttacaaacaggtcatgcttctgcgagcaccacgcaaactttaaactttaatacgacagttactaacacaataagtaacaaaaatgctgagcaagtctataaaattacactgccttcggctggtacagtgaaagtcaatttaaactcgtatatcgaagctgttatcttggatctgacagatgaaaatggagagagtgtatggggttatagcagagacatttacgatggatctgcttccacgccaaaacaatggtcggatcaagctgatttggaggccgggatctattacatcaagatttcacaatccagttaccatactggaaaatatgatttaaaggttggatttaatactgctggaaacaatgaaacagagccgaacaatggcacatcacaagcacagcctattacactcaataccaagaaaatcaacggttttcttagcttaaatgatgatacggattgctataaattcattttgaaacaagcaggcaccattgatgttcacgtagattcaaacatttatgatgcttctctggatcttctggatgaaagtggaaatgatgtttggggagatgaagacatatatggtggatcctctcaaacgccgaagcaatggtcaaagagtgttgatctggaggcaggaacctattatatcaagatttctaattccagcggttatacgggtaaatacaatttatatgtcaattacacaccagcaggaaataatgaagtggagccaaataacggtacatctcaggcacaggagctgtcaaacggccaaaaagtaaccggttttttgagctggagtgacgatacggacgtttataaagtaaacctgccaaaagcaggaaaccttaaaatcagactnnnnnnnnnngaacgaatcggattttggcattttaaccgattcacccagcaagccgtcttaaatgttcaccccaatagaagaaatatttcaaaaaagggaggattttgtcctcttctaaccgttaaaatgttttcgagtgcaaagtttttttctgtattgcatttaaagttcgacaaaatctacggaatcatttttaactttgagaatgccgcttgttcagcaacctcaaaataaaaagagatgacggccgcaagaactacaaatccaccattgcactcttaaaagcaggaattgtataataatagcaaatagaaaaagtcggaggggagtggggcgttaaatgcaaatcacggtcgcggaagcacggttgcttaaaaatgcggtgtccaaaaaactgcatgacttgattcaggatcgaagccagattgcctacgttgaatttgaaaaaggtgaagaatatacgccgcatgcacgaacatttcaggtggtgagcgcggaaattcagcaagtgcgaaaccactatcgggcggtcacaaaggcactggcagcatccaacttacgcacaacgattgaatggaagggtgaaaaaatatccatcgtagaggcgttagagcttgtgaaacaacttcgcgccgaagctgaaatgctccaagagtttggcaacagccaacaagtggaacgaatagcaagaggcgcttttgacgcaaatgttgtctacaagaaagcgctgtttgatccccctgcggttaaaaagcaggctgaaaaaatcgaaaaagaagccaaccgtttgtcgatactgattgataaagctaattttaacgcagcggttgacctcgactttgtagaggagtaccagtgaacacccggcatgagacccggcggcaagggacggagcctggattccgccttttgccgccggatctcatgccggcaaggaaaaggagatccgggggcttgctgcttagatttgagcatatcaaattgcttgacactcactatttacaactggttgcgannnnnnnnnngtcccaggagggattcgaacttataataggaaaagactgatatataagggtttataggcatatgcaaaaaactcaatgcaaaataaatgcaaaattattctatctctgcaaaagtgagcatctggatatttatcccggccagccacttttgcagttttttgtgacgaaaaaaatgagaaaaccgcttttgaatttcctcccgtggtgataagatagaatcaaaaaaagaatgggggatttgtaatgaaaaaaatgaaaaagatatttttgggaatggttgtgctgattatagcaataggattggtgggatgttcggatggaagtaataagagcaatacaaaaaatgcagaccaaacagacaattataagaaaactccaggtaaaattaccaatgacggtttaatgatcgggttagctgtaaggtcagaacagatcattgaaaactataacaagatcaataaagtaagagtagatgaagacaacatcactgcaaaaaaattggaaaacatgaaaggccaggatgatggaaaagtttataaaaacgtatattccgtcgaaggtcaatattcttggcatgacaaacgatatgatttcagcacgatagtttcgtttaaaaagaataacgttgatgatgatatgtacatactaaaatattcatctgaaacaaccggaccagtagttgatgtagatttaacgccggtgaattgaacggatctgagctgggcggtacaaagttaaatcttaatctaacaccggataaataaaaagagcaggccaaccacctgctctatttttgtgcaggcataggggggtattttttgcaaaatacatggacaattgggaacgcctgctaacaaaattataagaaaattgaactattttgtctatatcccccgaaaaatttttttggttttttggcgggatcactttttttcaaaaaccaataaaaaatatctaaaaatgtattgacaatgtacatacaaaatgatacaatgaaatcaagataaggaaaggagataagagaaatgaacgttatgaaacgggcttgggagattgctaaagcagggcaacgtaaatttggcggaaaggtaaaggaatactttgcagaatctctccggctcgcatggaaggaggcaaaagcagcaaaagaaattacggtggaagatgttgaaacatacatcaattccgtaatgaagagcgattcctattccgttaactactgggcaaaatacgggaaggaacgcttatacgtaaattactatacaggatccggataccgtaaagaacaagggtttcttgaattgcaaaacggtgttattgtggcacaagaacgtggcgcatatacaccggtaacaaaagcgttttggagatttaaaggcgctaaaataaacgcataaaaattaggaggaaacaaaaatgaaaattgtgtataaagaaacgtcttattccgaaactgtttacccggagcttgtaaaggggacaccaaaagctgccgaggcatttgcgattgtcgaacatgccgttaaggaagattacatattcagccttggggaggttttaccgtcaaccactttcgacaacagcgaatcaagaatacaaacagattataaaacggtcggaacgtgggaagtagaggaagatgagttcctggcggctgccgagaaaataaaggaaataatagcagaacgtaataacagacgaaagaatcgtgcggaagcctccgaaatgtaccgggaaatgcgaaaaacttttaaaccgctgggcattaaggtgtgggaagcaaaggacgccgcaaaaacttggggcatatcggtggaagagatagacggcgccgattatccggagggccattttaaaagtaacggcgcctatacgtttatatcagaaactgcgctgacggaaaaattcgggaaaccagaaaaatagaaaagagagcggatttatattcgctccctcttcccctacatctcatgttacggttcaacaaaaaatagcacaggttaattaattaaaaagatgctatttaaatacaccctgtgttatggttcatggactaattataatcacaaacttttatcatgtcaatgcgcatgttgtgtccatctttttggttatgggaggtatgaaagtgaaacgtacgaggcaatacaggattgatcaggatcttcttgatcggttcgaccgcgtaaatgaagcactgatgcaaaacaagagtgaagtcatccgacaattgatgaggaaatatgtagaggaaaaagaggaggagttgaaagtggaggtattagaaatcgttgaattgcgtgacaacttcccaaataacggcgaggcctacgccgtcgggaaggccgaaaatggaaattacttcttcgcttggggaccggaatatccgtatgcggatgaagttccgtcttacaatgtcgatgacggggaatccggcatagaacattttcccacaaaaaaacatgccatggaagctatgaaagcaactgtggatgcctgggaaacaaatatttagccacgcaattctggctaaaaattgaactaccactagcctaaaggcgtaggggttttacgaccttatttataaagcaaaactgccgaggaataagccccggcagtttttgcttagctcaaatatccaattcacagtttcaatccacgcatttttttttaaaaggacgcgatacctttaaaaagatattatcacgttattttttaaatttcaagcccccacatttgcgagggcttttttgatttatcctggtggatcattattatggctggatccggcttattttacccgcaacttttggccaacacggatcaggttaggatttttaatcttatttagcgccaccaggtgactgacagacgtgccaaaccgctttgcaattttggatagattgtccccagccttaaccgtgtagtattgcgctgtggaggcactcccggcaattttcagcttttggcccgcataaattttgttggggtcgctgatgctgtttagactttgcagcttggccactgtggtgccgtacttttgcgcgataccggacagcgtatcgccgggcttaacggtgtaaacggtagtcctgttgttgtctacttttttaaccgatttcgtcacttgtacggccgccttttcaacgcctccggtaaagtaggatagttttttgctgccgtttaacagattaagatccacggtgcccgggtaccatgctaccctgcaattttggctgtactgccacaaatcgcatggataatctggcttcttgtccggcttgccgttatctgcaccgtatcgcggcagccataaaaaatccgcctttactttatttagcccatactttttataaagctcgtgggaaatgtaaatgcccaccttgtggccagccgctttgcaagtgtcaataaatgcctgggacgctttcgcgaggttttcagtgccgcatgcttctaccgtgtcgccttccacgtccagcaccaaaaactttgcggcaggatccgccctttttaaaaagtcccttgcctcggtttttgcatcatttacggatacaaagcacccataggcataatggccaaagggcacgccctgctttttgcagttggccacatgatttttatattccgtgtcctccttgagcgacccatattgcacccggataatggccagatcaacatctttgccaaatcgttcccagttgattttattcgcgggtttgtgatgcgataagtctacaatttgacccattttaaaagtctcccttcaaaaaataaaaagagcaaccctatggctgcccttattttgtaagattttgctgttttaacacttctttttgcctttttcccttagcggttacatagttatttttaaaccatgcgattatggacgttacgagtgtaaacagcgtagataacacttctgtttgctgctctgctgtgcctgggattttataaagtccgcagctaaccaggatttggtttagcaaagcgataaataaaacaatggtccgaatcaatgtgcctttatccattttcattttttagtctcccttataaaaatttttcggccaggctaatcaggccataaattaagcccccgccgccaaatagggcaagggctaaatcccattttttatacgcattatttttccgaatatttagtgtgtgctcgagtaacctgtttagcaattcctgctgttcttctcgctgnnnnnnnnnntttcattttgcactaaacaactaatttcatatcatctagccacaagtgctttattcacaacttctaatgcttatttcaccacttgtagttaataaaattcatgggaatgttttctccgtttcatatatcaaaagccccccccttcattgatcactacgattataaaaaacaacaaccttatcgagtgtctaaattcattagagggctaatgaaaggatggtgaaatttatccctgttcgatcattcttgcgaatgcctcatcagggttaattgtgttaaataattttaaccagtcttgaaaatcgccttcataaaggaccttacctttgtgtagcaaaattaaatgcgagtcaatataagataagtcttgaagttgatgtgtagagattatgcagatacgctgattttcaattaatttcttaaatttattcataatttttaatcttgatgaagggtcaacaccacttgtcggttcatcaaagatatataattttctctcaatactactgagaagggctatgaaaagccactttctttcaccaacagacatcttaccaattttcatagaccacaggtgtgccattaattctctttccctactatccaaaaagtccaagtagtcatcaatttggttacttcctttttttccagataatctagctacaaactttgcaaagtcttttcctttaatttcgggtgagaaaaatatattttgagttagataaagcatttcctttttatcaggtagtgatatttcgcctgtttccggagttaagttcccagttaaacaatcaaataaagttgtttttccagcaccattaagtccaacgataacattaagctttttagtatttaacgtgaaagtaacaccattcaacacataatcttttgcttttttatacttatatttcaagttaaaaacatgcaattaattttccccctaacgagatgttaacgataaaagattaaatcgtttaataataaaaagtccaactacaaggtatagaagaatcgataaaagtaacagataaaaattatacgtataatctatgcccattagcagattaatgactatttccgtaatttcatgaatgatataatacggatttacatagtttaatagattactacttctgctatttaatgagagaaaaaaaagaggataaactaatatattcataattgtagataaattattaaacttaattggaatagcggcgattgagacacttgcaatagctaacgggaaactcactagtaatactattaaagaagataataacaaattaaaagaaaaggctctgtaataaatggaaactatacttgtaaatagaagcaaactaattgccccgaaactaatttgtgttaaaaggatcgcagttagaaaagtatatctattgcctgtaatcattacataagtctttaataaaccatattctctaattctagctatttgaagtcctataccgtttatgtaagttgatataataatgaatacccaaaaaaaggaaatatactgaactatttctttttcgtctgtagcatcgtttaaaaaacctctttgaaatacaagagctattactactggaaagataacagaccaaataagagctattttctctgctagtaacatctttaagtacagaagataaaatgctagtacttgacgcatagtatttctcctcacttttcatttagtagtccgtaataagaaaaaggttgctcaaagaattttttaaaaaatcacaaaaatattcataagtaatttcctttagattttccatcgttttattcaagttgttatagtcaactatgcttcggttgttacctgaatccgtgacgaaaatataacaaacgccgttaataggtagatttcccaagagtaaggatatagtggtgtccgactattcgataaatgcacttttagtgattcagtatgtaaaaatttccctgtttcattcgtttttgtgcacgccaaataaacctgcaaatttccattttttgcaagttttcgtttttttcttttttcctagtagtctattgatcgggatgtttagtaaaaggcttgatacaaacgagtaaagaccggtaaccatttgttggtctccgcgacttttaatttccattgccggccacggaaaaccagctttgaggccagtgtgatcatattctggatgacggttcggattcttcttcttgttgttttctttttcaatggcgtatcttgttttctcaagctttcttgtccaatcaagcgaagcaggttatacgcaaatacaccgaaatggagcacaaggccattcgtttcatatttgcctgacggcagccgttcgagatccagttctgatttaatttcnnnnnnnnnnaaatttgattcgttcagcaatccctagttataaatatttattacattgggtatttatcatgaatattatatactacacgtatagagaatagagggagcagaatcaaaataacaatcaagacaataatgatggtaacgactattctgttaataaggcccaaacagataacaatgtttccgatacaaaagaaaattgaggagaactgattctagatgcaacttgtgcactggctgatatttcctaccccaccgattttaaactattgaacgaaacaagtgaaaaactagatcatatcattgatgtcttacatgaaccattaaaaggaactataaaaaagccacggacttattgataacgagcaagaaaaaaatacctatcgatcgcaaagttacgacagcggaaacagattatccttattgaggaaatatgaatacagacaacttttggctattcatgaactttaccggaaacaaaaaaatgtaccggacaaagacacaccggattattagcatatctcagccacatgtacgtccaatnnnnnnnnnncctcagagctgtgcaaattttttcaaatcagataaactagggctttttcccaatcacggcatcatacaaattgaagaactggtccatttgcacacttcttttacgcattttcttcgataaaacagaacaactttcctgtttacatgactcattttttactttagagcccttgccaaaatgctatatcccctgaaactgtaagcagtcagacaattaaaggtcgttgatttattccactaaagaaagaagacgtttgtaggaacattatgacaaatgcaaaaagaaattgtgagtttttgattttaataggataaatttgcttattataagtgccagaattttatcactttttgaggctttgggcgagtttcaatagattaggctactcattcctgtggaaaatattgtaaaacggaaaaggatgattttttttgaaaaaaaaagagccgtgaaagccactcctttgctaagatataagtacgaccaaatatccagggagtgatttcatggctatttctattctaacacaaacgtatgtgtaaaattttnnnnnnnnnnaatggtatcgtgaagcacagttatttgctgtaaatgaatatgtggacagccgttttttaaaagagaatcaaaatcagctagagaaggtttcggaaggttggtatatttggcacgggggttatgacatgaaaaccgggattatggatatggacgagaaaggagattgactgatggggaaaattttccggctgaaagtctggggcgagtatgcgctgtttaccagggtggaagcaaaagtggaacgggtatcttatcccgtaatgactccgtctgcggcaaggggtattttaacagggattttttggaagccggaattcaaatggcgaataaaaagcatccacgtcttgaagcccattcagtattattccattttgcggaatgaagttgcttcaattgtacccagtaatattgtcacaagcaagcgggactatttcacagatgatgaccggcagttacgccattcaatcatgctgcgagatgttgcctatattataacggcagaaatgcatctaatgaacccgacgatggaaaataagaggaagtatgcatccatgtttttgcggagagtggccaaagggcagtgcttttatcgcccttatctcgggacaagggaatgttcacttcacttttccctgcctgaagacgatgatcaggcaatacccgatacaatggatattggcccaatgttattcgacttaaaatatcccgcagatcccggacaaaaaaatgcgcgtgcgatcccctatttctttaatgccaaattggaccggggtatattgcatgtgcccgagtatttatataaggaggtggatggctgaatgtatatgcgcagattggtggagttcgccgaacagcatgccaatgatttgccgcctgtcggatatgccnnnnnnnnnnactgttaaggttgtgaagaacaaaacagtggaggtaaagaaaggatgctagcaatgcctgaaattcatcatatcaaacatttgcgtgaaaagaaagggttatcgctttccgaaattgtccgcaggacgggatttaactggagaacagtcaagaaatatgcggatggagacatttcggtcagacaaaaaataaagagaaaacggggaatgatggaggaagaaggatacggtcaaatcattgatgactggctggaggaggacgccaaactgccaagaaaacaacggcggacaagcaagaagatgtacgaacaattaaagcaggaacatggctttaaagggtcttatcgaacggtttgcgcctacgttcaaaaacgaagacctcagcttaagctggagaaggaacggcgttacgagaggctggaacaccctccgggggaagcgcaggtggatttcggcaccatgtccgttgtgacgaaggaaggaaaagaggaagaccgatcaattctgattttgagctttccgtacagcaacgccgcgtatgcgtatccattgccggcggaaaacagcgaatgttttctttacgggctcactcagctgtttcgccaagccggaggcgtcccgagaaaactgcgcatcgacaattnnnnnnnnnnttaaggagtagagcagaacgtgttgaaatggtcgactgggatgacgaagcaaaactgccaatttccatccaggccgatcttttgagcctgaaccgttcaagcctgtactacaagccagtcgggccgtctcctgaagaattgtttatcaaacatcggattgatgaaatctaccccaaacatccctattacggatccaggcgcattgctgctttactgaatgccgaaggtttggtcatcaaccgaaaggctgtacagcgccacatgagggaaatggaaatcgtcgggatcacacctggtccaaacctgagtaagcgcagtcttgaacaccgaatatacccgtaccttcttagaaacttgaagattacacaccctaatcacgtgtggggtattgacattacttatatccggcttcaaaaaagttggatgtacctggtggcgctcattgactggtattcccgctatgtcgttagctgggagatagaccaaacccttgagatcgactttgtgctggaagcagtgaaacaggcattcttagtcgccaggccagagatcttaaacagtgatcagggcagccattttaccagtcccaaatacacggatctggtgcttgagaacacgattaaaatcagcatggacggcaaaaaaagagcccttgacaatatcattaccgaaaggctttggcgaaccatcaagtatgaggaagtatatttagggcttgctgaataagcaaaaattccagatttgacaaggattttggctacttttgtcgaatataaagtgtaaggatttcannnnnnnnnnattttggcaaaggctctaagaataccttgatttctttaataagtgaaataatgatttttaataaggataataagtaaaacatatggtaaaagcgcaaatcattttatgaaatcggttttttgactactaaaacagggatgtgcgtgcgatttaatacgccgagagtgacgcttcctaatagagcccgtttaataaaccctcttccgtggctgcccattataattaaatcagcgtcctcttctttagccactttacaaatggttgtacttggatggcctattttatgcataaactggacgcgttctttccaagcggcaaacagctgattttctacctcttcctttatttgattcgcaacggtttcctcatatctttctactgcatccggcactaaatcgtaggcataattttcctttgccgtcacatataaaacaattaatttagcttcaggccaaattttcaaaaaactttttgttgtttctgctgcatatctcgagtaattagacccatccgttgcatgtgtatggcaaaataaannnnnnnnnntgcttttcaaaatatttcaccttgggaactatgtttgctgccaagtaaaagccgccgtccaaagctccataattaagcagggttggattaggcgtttgattgatcactttcgcaaaggtctgctgggccggagggaaacgaacaaagaacttggattctttaatatttgaattatatccaaaacacaggaccagagacaaaaaagcagtcgcaaatactacatcccaattgacatgattcaaaatattaaagtctgacttttcataggcggattgtagataataaccgattgatatcagcccaaacatgattaccggaacgatgattaaataataactaaaacttgaaacactaaaattcattctcattacttgtcttacaagggtttagagcaaaaataaaagcatgaacactggaaactcggtataattgaagtgctaactaacaattaatcgaggagtgttcatgttatgaaaattataacacaaaacgaccatcagtctcttgaagttttatcttcaatcgaagcatttttttgcgttttcgcttatctcaaattgcgaaggtttcaaacgctgtaaagacaaaaggtgttccatttcgaacgctgttctgttatttgatcggtacacttttctcaaacagatctgcataccgtgattatttgaagcatcaagatcagctcggattctcagataagactttccgtaatctactgaataacggcaaaatcaattggcaaaagttcttggttttgctctgccgccgtatcattgtgttcatcgaacccttgaccgaaccaacacgccggaatgtattcattttgaatgattccatgtatgagcgagccagcgcaaagcacgttgaacttgcggcgtttcagtttgaccatgcgaaacacaaacatacccgtggctttcggtttcttcaactcggttggagtgacggcaacacattcctccctgttaacttttccttgctttctggcaagaatcaagtgtgcagcccaaaatccattgacggccgtacattttcaggaaagcgtaagattcaggcacagcgcaaagcaaccaatgtagtgttggaattgttatcatcagccttgtctcaaggagtgaatgcttcctacgtcttgtttgattcctggttttctagccctaagatgtttcatcagttgcgtgaaatgggacttcatggagtagccatggtgaaacgttctaagaaagtttattaccagttcaacggtggactgatgaatgtgaaaacgatctttaacacccagaagaaacgtcgcggacgttcacgctatctgttatccgttcttgttgaagcagttgacggggaaacgtcggtgccagtcaaacttgtttatatccgcaaccgcaataaacgaaatgattaccttgtcttggcgacaacggacacccggctctctgaagatgaagttattcagctttacggaaagcgctgatcgattgaagtatacttcaagatgtgtaaacagtacctccgcctagcaaaatatcaaggattgtcttatgacggtatctttgcacataccgctcttgtcgcaattggttactcaatccttgcagtccaacaccgtgaacaggtagatgatcggaccctgggtaagttgttttatctcatggttgatgaacttactgacatcaccttcgcagaagcgattcaacaattgattgatttatttaagagcctctgccaaaataaaaatatacccttgagcgaggctctggaaaattaattatcccgattttttttttgccttttcatccagattttcaatttacatccagattttcaattcaatagaagtaaaacggtcatttttcttcaaaaaaagggcatacgtatcccgccttcacaaaatggtttttttcactaccctttgtggaaagaaaacgttcatttgagttattcacatatccacctgtgaataacttaatttgctctttgcagtcgattgcgtgtccatccacaattggcctttccagtctgatggtacgccatatttgccatgatatgcatagatatcatgcatcgatctacatgagcttcaactgcctgtttcccacgcttgtgaacacgacggagactgtatccgtcttttagaatgccaaagattctttcgatgatcgtcctggcactatataacacttcaaatgtgcgaccatgttgaggcaactcgacatctacttgaggcgtttgatcaaagtctatcctaaatactcttccttgtgctgccccattacaacattccgcgttattcgctagcgggcaggtgagnnnnnnnnnntgtctgactgcctactgcttcagggggtatagcattttggcaaaggctctaaaaatgcatcagcgctttaaactgtttcacatttcttctgcttaccggtatttccgcgtccatcccttttaaacggagcaaatacgtctgattgaacaaaaccggtttgaaaaacgattccaaaattacctcgaatatgggtttgccatgggcggatttgtcatgaaaccttattatgacgatggtatcaagatcgcttttgttagggctgactgtttcctgccgacccaaagcacaaatgatgagattcaagccggcgtgttcattaacgagacgcggaaaggtgacaaattttatacgctgcttgaatggcacaattgggacggtactgactatgtgatcacgaatgagctgtatgaaagtaaaacaaagggttcactaggatcaaaggtgccgttgtccgatctttatcctgacctagaagaaaccgtaacaattcaaggccttacgcatccattgtttgtgtatgttaagccaaatcttgcaaacaattttgaaccggattcaccgttaggcatttccatttatgcgaatgcaatcgacacgctaaaatctcttgatatcgcatttgacagctttcaacgcgaatttgtgttgggaaaacgccgaattatggtaccacatacggcgatccggacagtagttgacccggaaacaggccagatgcagagatactttgacataaacgatgaagcatatatcagctatgcggaaaacgatactcaaaaaatgattcaagagatggccgcagaactgcggatagaagaacacatatccgcaatcaatgcgttgctgaacattctggctgcgcagactggtttcagctccggcacctttgcttttacgggtggggcaagcgtccaaacagcaacacaagtcatctcggaaaacagcaaaacattccggactaaaaatagccatgaaatcatgattgaagccgggataaaagaattaattgaggccattttgcaattgcttgtcatttatcaagagcttccggcaataccggatattgatgtgacaattgactttgatgactccattgcagaggacaggcaggcaaacgctaattattatagcggtctcgtatctatggggcttatgccaaagcttaaagcaatcatgagaatattcgacttgccggaagaagaagctcgtgagtggctggcgcaaatccaacaggaaaacggtcaacaggtcccacaaatgatggaaagcttcctgaacacggcggaaacagatgaggtagggtgataatctatgttaactcccaaccaactggaacagcttgcaaagccccttattaatatttatgggcagctggaaatagacatcatcaaagccattgtaaaacgtctggagacaaagcaggacataacaaaggacaatgtattgcattggaagtttgagaagctccggcagctcggagacctaaataaagacgtaattcaactcatctcactgatgaccggcaagacagaaaaggagttggaaaagctgattaaagagagcatgaagcagagcgtgcaacctatggataattggttgagtggtttggctgatgacggaaaaattgataaagcaccgccactcgagcaagacacgcgtatttttaatacacttctcacatttcagaggcaggcaacatcaacgctcaacttaacaaattcgaccattttgcagaacagccaacaagtttaccgggacattatctcccagtcgacagtaagcgtcatgactggcatgaaaacccatcagcaggcggtagcagatacggcagccaaatgggcagaaaaaggcattccggcacttgtggacaaaaaaggacgacaatggtcaattgaagggtatattccgatggtggttaagtcagtcgctaacaatgtggcaaatcaaacgcaattcgaccggatggacagctatggggttgacttaattgaaatcagcagtcacgttggcgctcgtccgggatgtgctccctatcagggcaggatatttgaccgtaacggtaaaagtaagaaatatccctcgttggcaagcacgacatatggaaagcccgccggtatatttggtattaattgccatcatcacccttacccgtatatcccaggtgtaagcgtaaagcgatatgagccatatccgatagaggaaaatgcaaaagcctatgagcaaagccaacagcaacgcaagatggaacgggatatccgcaaggccaagaataatcttgaagtgatccggcggctcggtacaaaagaagatgttgccgccgcccgaaagaaagtgagggaaaagcaagcgaacatgagggcatttatcaatgataccggcagaacgcggaggtatgatcgagagcaaatcattaaaaaatgaaatattaaatgatttgtcggaaatataccggctacaatgtgaggtgagcgcaaatgctaaaatatcgaaagaaaccagtcgtgattgaagcggtacagtatttaggtaacaaaattatcaagatatatgtaagtttgtcggtaaagagttgacaatggagtacatggatacggagcaaatcttaaccattgaaacacttgaaggcgaattgaaagcaaataaaggtgattacatcatcaagggtgtgcaaggtgagttttacccatgcaagccggacatttttgagaaaacatatgagcctgccgaataggtggagatgatccaacatctcggatcaacgctgttatgtgtgaaattaagtcgccaataggcgtcttttttaattccaatacgaggagcgatgcaaatgtttaacattctacgtttaaacttgcaattttttgcagcagacaccggggctggagtagagggcggaggtgttccagttgacactgggcaaggaggtgatcaaaaaacagagacggtaccgcctgcaaaccaaacgccgccggctcaaccacaacagacacagccggagaaacaagaacaaacaaatcctgagccgccaaaggtagatacaaaggaaatcaagaccaaagcccaggctgaactgctgaaaaagctcggttttgaaaaggtggatgagctgcaagaagtgctgaccaaatacaaagaggagcaagacgctaaaaaatccgaattcgaactgcaatctgaaaagttgcagaaaatcgaagcggatttttcttctgttcaggccgaaaatgagtcgctaaaggctcaaatcagcgccatgaaagcaggagtgaaggcagatgctgtagaggatgtggtcgtgcttgccaaaacaatggtcaatgatgaggtggacatggatgccgccatagcaaaagtgcttgaaaaatatccgcaatttggacagggaaaggaggatccagagcctgaacaaaaaccgagctttaaaaccacgactggggagcacaaaacgcagccgaccactgatgtagaaaaatggcttgaagcattcaaacttaaataataggagatgaaaatgatgccagtaaactatgctgagctgtatttgcaagctttacaacaacgttttgcagagggtcttctttttaatgatctctacaatacgccaaacaatcaaaatatcaaatggacaaacgcgaagacgattcaaattccgagaatcacaaccggcggatacattgatgtcgatcgtgatgtagtgggcggtttcactcgccgtgccgaaaatgattttgaaccgaaaacacttgaacatgaccgggaattttcaactttggttgacccggtggatgtggacgagtcaaatatggctttgactattgcaaacattactcgcgtttttaacgacgaacaaaaaattcctgaaatggacaaatatatggcgtcaaaattatatacggaatttatcaaatatggtggttcggcattaacagataatatcacggaagctattgttttgcaggtctatgatgaactgatgatgcaaatggatgaagctgaagtgccacaaactggacgcattctttatgtgacgcctgcagtgaataaagtattgaagaatgctgacagtgtccagcgttctattttggttacgcagaattcaggttctattaatcgaaatgtccgtagcctggatgaggtgacaattaaagttgttccttctaatcggatgaaaactatctatgactttacggatggtgcggtggctgatgcttcagcggcacaaatcaacatgattctggtgcatccgttatcgctaattgcaccgatgaaatatgaatttgtcagcttggatgaaccgtccgcaaaaacaggcggaaaatacctgtactacgaacgtgcctactgggatgtatttgcaatcgagaagaaagcgccaggcattaaatttgctattactccagctgctccagcgagtgacggcggaggctcgacgggggcgtaagagctcccgttttgatataagggaggtaacagaatgagcacagtaaaagtcaggaaagaaaaccgtgtcttgcatgtaccagaagggcaagtagccaagtttttaaatcaagggtatgaccaaattgacgagactggcaatatcgtaaaacgtgcgactggcggccgaatggttacattgcaagaatataatcgcttgcttgaccgtgtggcggaattagaacaggagttgtccgctccaaaaggcgccaaacaaaaaaagagtgagtgacgatgaaatacattgaccaggatttttactcgaatgaatatggcggaacgaccattccgcctgataagtttacagaaatcgcaaacgcagccgaacgcgtgattgatcaggctacttttttccggatgagccagctggatttttccaagctatccaaccgcattcagtggcttgtaaaaatggccatatcagcgcaaatagaatatttttacgaactgggcagccatacggaagcgggcatgcagacggtacaaagcgcatccatcggcgggtttagttacgctaatccgcagatggatagcaataaaaatataatgctatctgaaactgccattatgtatctaacgcaaactgggctgatgtatagcggcgtgaacgtatattaaacgtgattccgtttgtcttccgtttcggaggtgattactatctttgtaagaccaattccgccaatcatgatgccacacaccgtccagctgcagtcctactcgggtagtagccgatacggtgaatcttacgcggatcccgtgacgattacgcatgttcgcgttgtaccaaaatcacagttgaaaacacagcttacctttggatttaacgctgaaacaatcgactttgcatctatgttgtttatcgacgtaagcacatcgaaacaaatcacagacggtgcagagcaggatttgaagattgtcccaaaagaaaaagacaaggtcatttttaagggaaaggaatacgtcatccaaagcgcagatgagctgttggccggagataaagtacatcattatgaatgcgggctaaacggggtgtgatcagatgattaatgtgcaagtcaatatcgggaatatacgaggaaaagttgaaaaggctacgaggtatgggcaattcataaccagccaacaagtattaaaagactgtaactactacatcccgaaggataagggcacattagagcgttcatctttgcaagcctcagaccttgagcgtggtgaaatcgtttgggatacgccttatgcgcggcgcctttactatcacccggaatacaatttctcaaaagataaaaatccgcacgcacgcggcctttggtttgatgaagcgaaagcagtgcgtggagataagtgggttgccgttgcacaggaaggggttgaacagggccttgacagagaatgagctcgattttcaggactgcatgattgatgccattgaagcgaattgcaatttatttgcgcccattgatgtgccaatcattaaaatcaatgtggacggcacaggaagtggtatcgccttcatgttaacgccaatcggtgaggaaacacgattcatggatggcagccgtgacaggatgtatgcttttcaaattagtgctcgcagccctgatcagctacaagtcctcaacacattattcagcatcaatagattcatagatgggcttaaaagtggtgacattaaaagcaaaaatggaacatttgagtttattaatgccgtgattagaagcgtgccaaatttggtgcaagctgacactcacggctttttatatgtatcaaatttcgaggctgaacttttattaaaggagtgagatgaatggcttttaacttaaactacaaaaacaagtttgagatcgacacaaaagggaatttagacccgaattcgacgacaggagctgaatttgttccgattgcagccgggatttccacggttacacctgctccaggtgacacaacggacaatacagcctactacaacggtggcggatttgcaagtacagatgtaaccgggaaaaacttctcgcttgcgttttccggtaaccgtgtcgagggcgacgccgcacaagattatattacaagcaaagagttttcacttggagacgattgcaaaacgctgctaaggtggacaaaatcagacggccgtgtagttgtggctcaagtcactttgagcgctattaccacctccggaggcgcagcaaacgcaaagcaaacgtttagctttacagctaactttaatggagcaccggttgtgcaagatcaggccgcgcaaggtcaggccgcaggataaaaaggggctttgtgcccctttttgtacataccaaaaaaaggaagtgtgctaaatgattaaaattaatctgcaaaaagtaactgaaacctttcaaattggagacaagacatatgaagctgattttaacgatgaggcattgaaaaaatatttcaagcaagggcaaaaaatctgggaatacgacaaacaagttagtgaaaaatatccggatatcgagaacactgatgatttcggtaaggtctgcaccgcagtcattgacgtgctcccagcccgggcggaaagctataaatcttttttcgacgaaacttttggtgaaggggccggtgaaaagatttatgccatctgtggaaagtctacaccgaacatgcagaaagtattcatggaagtgtggaaagtgatctatcgtaaagtgatggatattgaaacggagtctgacaggactgccaaaaagtatgtgaaaaaccgcaaccaaaagcgatgatgatccatgttgagcctgacacagccattagataacgaaattgagattaatggacaaacttatgaatgggatttgtcatatgacaacgtgctacgattttatgaacttatgaatgatgatagcgtgaatgaaatcgaaaagatacagctcgcttttaaaatgtttgtaccagaatgcactgcggatatcgaaacacaaattgaaacagtgcaagccatctccaaatatatctccgggcaggacgaggaagaactagagccaagtgaaaaccacaaacaatattacagttttgagcaagatgcagattatatttatgcatcttttttgcaggactatggggtagacttaatcgacttacaaggcacactccgatgggaaaaatttattgccatgctgaacagcttgagtgaacgcacgaaatttagccaggttgtcagcatcagggcagctgaaatcccatctggaaacagtgaatatgagattgccgagcgcaaccggttaatccagttgaaagatttgtatgcgttaaaagacgagaacagtgtctcttatgctgaacaggaaatagatagcatgtttgatcgattagttgaatctgcacaggaagggggcgaaagggaatgagtgatggaaaagtcgtcatcgacgttaggctggatgataaaggtgtaaagtcagatattcagataatcgaaacacttttaaaagccataggccaagacgccggtaagaaaatggatgtcaattttaaaaaaaatgccgaaaaaatggtaaatgaagctgaaaaaacggctgacaaagtagacaaagaatttgataaacctgtcgagcaagaagtcaagattaaagataaggccacaaagcaggctgaaaatgtccataaagatgtaaaaaaagaaacagaaaaaccggttacacaagaaattaaagttgatgaatcaggtgccgtggaagctgctaagaaagcacggcaaaagatggtgagagaagcagaagaagcacgcagccagatttcatccgtattgaaaggctcatttgtcggtacatttctgggaaatatggcaacaaacgctgtatcgacagttaaaagcggtatttctgaattgatccatgccggcattgaatataatgccacacaagacaagatgctggctacatggacgacattggccggatcagcaacaaagggtaaacaaatggtggacatggttaacatgttccagcggaagacaggatatgctacagaagccctcaacgaaatggagcaaaaaatttatcacattaaatctagtgcatccgaaactgaaaccatgaccagggcatttactactttgggagatgccatgggcttgactaatgatcgacttgttggtgtagcggaacagtttagccagatgatggcgaccggaaaagcctatacaggtgaccttaatatcatgaccaacgcctttcctgcctttggtgaagctttgcaggaaaccactggggaaagcatggccactatccgcaaaatggcaagtgaggggaaattggatgcctctgttgtagaagaaacacttattaatatgtcccacaaatacaaggacgccacagaaaacgccatgaatacgacgcaaggattatggcggtcgatcgaatcgaactggggacgtctggccggaaaatttaccgcaccgattttcaatttgaaaaagagtggatttaaagacttggaagactggttggcatcaagtaaggcagatgcttactttacaaatcttgggaaagacgcagcacaagttgtaagcaaaatcacagacattgtggaatatgtaaaagaccacaaagacaccatcctcggatttgccaaagctttcggtatcctttacggcgaaatatgggccatgaaaaaaattgcgggcattgtagattcttttaatatcgtaatgggcggattaggccgtttacgaggatcaatggcacttacggcacggtcatcagaaacgatggcggcaacaacaatagcatccaacgaaaaagtagttgccagcagcggagcttttagccttgttggtaaacgtatggggattctaagaagtgctgccaatattggcggcgcggctcttatggcatttggtggaaaatggggcatgattgcaggtattgcagccaattttctgcccgaaattttaaaagcaggaggcggtattttacgatttggcgggcaagcgctcggtgctgtaaaaaatatgcgttttttaataggggcttttggagatgccggcgctgcagcatttgggttgagtaacccacttggctggatcataacggcgattgctgccgtaggtaccggcttttactatgcctataaacatataaagccattccgtgatagtatcaatgatcttggtgacgatttaaaaggtcatttcattcataccatgaataaagtaaaggattttttcgccaaccctttgaacttaaaaatcaaatgggattccagtgtcagtaaatcagaccagaaagcaatagacagctacacaaaacttgtggaccaggcacaacgaaaacttgaagatttcgtagttacaggccgaaaagtaagcaaacaaaatgttggtagcttagtaaaaccatacgagcagatggcaaaacaaatctcaaagcattttgacgacgcgacgaaaagtgcgaaaaagaatctcaaatatttggatggcctaaacagagatgagtataacgacatcttaaaaaggactactaaagctaataataaaaacaaaaaagaagtacagaaaatcactaacgacataaaaaaaatatatgaaaatgcagccaagcaccatagaagtctgacagcggaagagcaggaaaaagtaaacaaactacaagaaaaaatgaacacatacgccgcaaaaagcgtttctaagtctgcgaaagagcagcaggaaattctcggtaaattaagggatcacgccgggaaattgagtgcacagcaagcagcgaaaatagtagcaaacgctaaaaagcaagaagaacaaaccataaaacatgccagaaatgaatacaaagaagcagtggaccaagccgaaaagaaatacaagggtacgaagaactgggctgacgagcagtactatgtgaacggatcaatttctaaaaaggaataccaggacatcgtaaaaaacgcaaaacggcaaagagacgaaagcattaaacacgctaagaacaagcgtgatgcagtgatcgcaaatgccaaaacagagcaaaaccaaacggtcgagttagcaaagaaacaagcaaaaggacatatagacgcggtcgattgggaaaccgggaaagtattgaacaaatacgataaattccgggcaagctttgcgcatgttattaatggcattactggatttttcaataaaatctttgacaagattggtatgggtaaaataaacatcccacaatggcatccatccggatatgcacgcggaacaagtggtacaacaaaagatgaaattgcactgacgggggaagaaggtccggaattggcacattctcctggcattggaacatatattgtcgggaagacaggaccagaattacggtatttgccaaaaggaacttccattttgccacatggcccatctatgaagctattaaacagccttggcataaaaggatatgctggcggcattggtgactttttcactggtttgtggcacaacgtagaaaaaggagcaaaaacggccattgacatcatttccgacccatcaaaattaatctcgtatataaaagacaagactggcctatcaaacttccggaataaatatactggggttttaaaagatttggcgatcggacttccagatgaattttttaaaggcataaaaaacaaattaaaagacgcattgattgtgaatccaagtggatccggggtacagcgatggaaaccggcagttgtgagagcccttgccatgaacgggctatctacaagtgctgaaatggtgaataaagttttgcgtcagattgcaacagagtccggcggtaatccattagctgtacagcacggatacacagatataaacactataaccggcgacttggccaagggcttaatgcagacgatttccgcaacctttaacgcttacaaattcccggggcacggaaatatttttaatggatttgatagcctgctggcagccttaaactatgcgaaacaccggtatggtagaaacctgtccggactaggtgaaggccatgggtatgcagacggaacggaaagctcagcaggcggacatgtatatgtagccgaaaaagaaccagaaatcattgaaacgaaagatgggcgcattgcaattgcaacacgtccgacaagttttgatgatttcatggccggaagcaaagtgacgccgatctcgaaattaaagagatacgcagctggaacaattgaaaaagcagcaaacttagttaacagtgtatctggtcctaaagttatcatcgcgcaaacggtcactgcggcgggtaatgggaaaccaaataccaaaacaccgccgatcgaagtacaagttgatgtgaaaccacaaacacacgtcatacagtggaatggtaaagcggtatataccgaaatggtcaaatatgacaaacaggctacgaatataagaagcatttttaaggggttgagctcgatatgaccgcgatagtttcagatacagaattcggatttttttatgccggcgctcattcccgggaatttaatttaaaagtcattgagatccatagaaacatttttccaacagtcgaagagcaaacgcaaaatatccccggaatgtccggggatttatatttgggaacaaacgtgaaaaatcgtacttttgtggtagatgttgaaattgtggccgggtctcatacgcagcgtattgatctgattcaccaaattagtgactggcttatgccggtcgatgatgctgaatttgacttaatttttgatgatgagcaggactttacttactatgcgcatgtatctaatataaccgaagtcacacggtcgttatacaaagggaaggcaagcattacctttagctgcagcgacccgaaaggctacggcgaatatcagcagcatgacatgaccacaaatcctataacgattacaccagacgggacagcggaatgctatcctatttttacatgcatgcccaaaaaagatgtaaccaaaattgcgattactgatgaggatggaaattatgtctacttaggagctgatgttgatcctgatactggtgacgccccaatagataaggaacccttagttttccatgacacttgtaatacattagctaattggactgctattaattcatctaacattacttttgagttggaaaatggtattccatcaggaaccatgagaagtacagcaaatgcgataaaagtagggaaaacgagtgatggttatgctgattttggagctgccacaaacgataaaaaatggcacggtcctgttagattacaatggctccctaatggatatgatgattttcgaattagagtccgcatgtggaatcgtcaatattactcaagagctaggggcaaatgtgaagtatatttgttggactcaaacgggacaagatttggaaaaatcatgctgaaagataatggaagcagcgaagaagtatatgcgcaagtacaactgggcacatcaagtagttataaaaacatttattatggtaaaggaaacatcaaaaaagggaaaaagaaaacaaaaacagttaagcttggaacgggtacaaagaaagttactgaaaagggaaagtcaaaaacagtacagcagtggaaaacagtcaagctagatgaagatacatcaactaatacttttactgatttctacggctatatcgaattgcaaaaaataggcaataaatatcgtgttgaaatcatgaaatttgacgatgattcaaaccctgcttggagtaaacctttggtttacacatacacggattctagcggtaaatatgcaaaacagttagctggaattgctttttatactgccaaaatggacattaaagaagatgctgctgatccagtcaagcattatacaaataatgggatggggcttagtgatgttaaagtatggaatattatcgatggaggaaatggatccagtgcttctcccacaaccattgctcataaaggtgatgaaataaaaatcaattgtgaagatcgcaccgtatataaaaacggtgctatttttatggataaactttatattggaagtaattttccaacattacaaggtggtgttgaaaaggtattttccttcgaacccgatctaagtgatgcagactggtattatgaatataaaagtacaaccatttagaaatttacgttataatcaatttataggctagggtcgctcccgaaaagaaggcacccaccttcctgcctaataataacaaatgggagataacttggggaggttatcaatatgcaggaagtttggaaagacatcagtggctatgaaggtttgtatcaagtaagtaatttaggacgaatcaaatcccttgaacgatttgatagcttaggaagaaaagtacatgaaaaaatacggaaactacagataaccccacatgggtatgttacggttgatttaaaatcaaatggtaaaagacaaacttataatgttcataggttggtagcaatagcttttatgggttacgagaaagataaggatataaatcatatagatggtaacaaacaaaacaaccgtttggaaaatttggagtgggttacaaggcgagaaaatatgattcatgcatgggatacgggtcttaataagaaaaagcgaaaaccggttatacagtttaaagccgggaaaaaaattgccgttttcgcttctgcctacgatgctcaaaaatcaacaaaagtacacgctccacacatctgtgcttgctgtcatggtaaaagaaaaaccgccggaggatacacttggaattatgctgaataaattacttttacagatcctaaaaaggatctttttttgttaggaggtgatagtcaatgtatacaatattagatccggatttaaatgtctgtggagtgcttgacctagatggtaaaggatgcaagttttacaatgacgtacgatcaaccaaaattgcggatgatcaggggaaaatttggagtgataccctacaaatatcagtcccatatggttatcgggagacagcctacatgacaaatggctatcaccttcttaagcagggaggggatggccgtttttattgttatagaatttttagtccaacagatgaagctggtggctcaacacatacaaaaacagttcaggcaattaatctactagcttgggatttaactcacatatacgtacaaccaaaaacatttaaagctgcaaatagccaagatgcatttgaatatattcttcaaagatcaggctgggaaataggtgagaatgatttcttcggtggggttaagtcacttgagatatctgctggtaataatgctatatattggttagatcaattcactagccaatttggtgttgaaattagggcctatgtagaggtttataacggaaaaattgttcgaaaattaattgacatagtagaagaattaggagaatcagaggggcgcagatttgagtattctcatgatttattaggagtgactagaaccggtgacgactcgcagatgtatactaagctatatgtctacggaggtacaaatagtaaaggcgagatagtctcgatagcaagcgtgaataatggccgagattatattgtagatgacgaagcaaatgatctctataacaatggtaatcaatacttagaaggatacattgtaaatgaaagtattgctaaccctagtggtttattagattggggtaaacagcaactggccaaatataatcatcctaaatatacttatacagttgatgttgcacatttaggctacaagccgaatcttggcgatcgtatacaagttattgatttttcaatggatcctgagttgactttagatgccagggtcattcaaatggatgaatctgaggcaaatccagaaaacaataaagtaatcctaggggaatttgttgaggtgcaagtagttaccccagaggatatttggaaactacaagctaaggctgcacaggcataccaagaatcacaaaaggccaaagcatataaagtggagtactttactccagatggaacggattttgcagatgatacggaaaagcgcattatcatcagggtttatcaaggggctgatgaaatcacgtcgaaaatagataatgataagtttatttggcaaaaaataaattcggatggaagccatgatacagattgggaagatagacatgtaggaatcggaaatgtaatcacagtaggttccgaagtggcgggaagcacaattcgttgtcaagttgatgatggtttaagtgattcgattttatttgccacagaagaagatgcagcatacttcgctaccttgcaaatggatccgcctagtggttgggacgactttactaacagtgttgctcagtatgctcaggtagattatccaagaagtgatatttattggtcgcaaagatattatggtaataaacgccatagtggtgatggatcggctaatatacaaagttatgtacttactcgcactgatttaaccggagccattaaagaccgtatgtgggttattcgtggtggacatggtgcccaatttggaattgagtatattaacggcaagatgtggatttggtcttattatcttgatgctgctaataatcaatggcatgttgttaaatttccttaccaagctaataaggttttggattggggagatagcagcattgtaaatctactaagtacaaatggcggttatagaacgaatttagacgtacgaaatgggtacgtcctttttgtatatggaactactaatccaacattttacgtttgcaaaaaagctgatgtggagaacaaacaatttaaaccattatacactgcccgaggaactgatgtgaattattttggaacagatcaaacttatcaaagtgcgtgcctagactttccttacgtctattttacaagtggcaatggagacggtagcgaccaacgttgtttgtattgttttgatatacgatcaaagtcattagtttaccggattgtttatacatttgacaaaggcacaatcaatcaaatagggcagtataacgaacccgaagcaatcagttattactacgactcggatggaaagaaatggctaatacaaggtttcgcctggggaaatgaagattcggaagatagtcaaaggacaaatcaattatttaggattaatgagcataagcgaggtgatgcatcatgaccattatgggcagtgtagatatttcttttactaactcaactcagattgcaaaaggagcagagcaaacagctggaagcgcgcaacaaacagcaaatactgcccaagaaacggcaaatggtgcagcacagacagctggacaggctcaagaaactgctgaagctgcgacacaaacagccacacaggcagcagaagcagctgcagatgcagcacaagcagcacagacagcaattacgactgccaatggtaaaaacaaagcatattatggcgcaacaacaccaaccagtcccaaatccggtgatatttggtttgtggaggatagtagcggcaatgtgacagcaattaagcattatgatggcacacagtgggtaacggacgttgacaacaccgcacttgcgcaacagattagtgccgcacaagcagccgcagataatgcggtcacagtcggacaagccgcccagcaaacagccgcagatgcggaagccaaaggggacgcggcggcgaaaacggcagaggaagcaaaggatgcggcaacaaaagcccaagcagatgccgccagcgcagttacaagcgcaaataatgcggtcgacactgctaacaaagcaacacaagacgcacaagatgccatcgacaaagcgcaggatggatttgatgcggcgcaggacgccctatctaaagcaggcgccgcagtcgacacagcaaacacagccaaacaggtagcgtccgatgcagcgacacaagcaaacacagcaaaaacaaacgcacagacagcgatgtctaatgctcaggatgctataagccaggctaaagcggcaaatgacaacgccaatacgcgtgaaaagtctattataaaatccaacacggcgccatccgatccagcaacagatcagttgtggatagatacatccaaaacaccgcaaattatgcggagatggactggtagcacatgggttgacttgtctccaacacaagcaagccagatcggcgcagtaagtacgacaacttatacaacagatattacaaacataaataatacattgagtcaaaaggcaagcgttacgacggtaaatacactgtccgggcgtgtggataaggctgagacagctattacgcaaaacgcgaatgatattgcgttaaaggcggataaaaccgttgtggacacgctaaaacacaccgtggataaccacagctcactgatcagccaaaacgccgatnnnnnnnnnnggcctatgtggatcttatagatgcgaacggaaacaacatctgggacgaagaatctgtttatgacggaaccaaagagactcccaagcaatggatgaaagatgctgatttagaggccggaacctattatatcaaaattcacagccctgaaaccggcacttatcatttgtcaacctggtttactgccgccggaaacaatgaatcggaacccaataatggaacgacccaggcccagcagatttcccttaatacgcaaaaaataactggttttctgagcgagagtgatcacacagattgctataagttcacattgccaaaagcagtaaaagttacgatgaacgtagatttcagtatgaaaggggtcgatcttcatctaacaaattcaaagggaaccgccctttgggacgaccatatttacgacggctccattgaaacacctgaacaatggaacaaaagtgagagcctgccagcgggaacatactatttaaaaattagcagtgattataataccggcaagtacgttttatccgtcaatgcacctttgtacccttctgcaccatctattaatacggtaagtaccaatagtacaagtgtatctggcaagacagacgcaaactgcacggtttatgttaaagccggttccaaaacnnnnnnnnnncccagcgattttctttatttaatttcccaccgaatggtaaaaaaaatcatctacaaaagttaattgatgttcggtctttttgtacatcgtaacagcctccaagtgcaaggttttttacgtgtttcctttgaaatccttacactctatattcgacaaaagtagccaaaatccttgtcaaatctggaatttttgcttattcagcaagccctaactacaagatatagtcctaaattataaaaaaaagacggtaattcatctccccattaaattacggaggataatgaccgctttacctaaatgcccttgagaaccttttccttgtttttttaaatgtcacagaactagttttatattgttggttttcctggttgtcttgggaatacaaaataggaaagggaaataagtaaatcaatgattaaaacaagcgaccaaatccccagtacttgaataagcgcctttgtccgttcatagtcattaataaaatagtaaataattccaattaaacttgccccaattaagtacgaaagaagatgacgcccccagcttttcaaattctgtttggcaaattgtaatccatataatttaaccggttttggtccggtttttgtgatatagtactgaaaatgctcatcagcccaacgaatcatgctttttccaaatccaacagaaataccaatatagatagctgcgagtgcatgagcttttgttgccgtcgtcccgctataaaggtcgaaagttgcagcaattatcaagatcaggtctacaacaggtgttagtgccaaaaagatgaaacccagcttctccttcttcaataaataacggaaactcaacccaagtaaaataaaaacccaaaagccgatttcacaagcaattattaaccaaattatccaattcatttccatcacctttttttacaaaataagaatcaaaatacagggaaaaattttgataacgatttttcccaaacaccaggcatcaccgttttttaatacaaatgtgctaaataaatcataacaaacatttttatttaatacaagtgtattatttaaatttttatggtaaactgatagtatgccaaaaattgttgatcatgataatagaaaaaaagcaattgctgaagcgacttggcaagttattttagagcaaggaatgaaaggggcgacagtacgaaatattgctaggaaagcggggctatcattaggcgctcttagacactatttctccacccaagaagaattgttaatttacgcgatggatctggtgaaagagagagtggctgaacgggttgaaaaaattgctttaaaaaacttgccgccaaaggaaatgattttacagatgcttttggaaattgttccgacaaatgaaacgacaagagctgaaatggaggtttggcttgaatttgtattatatttccgcaataaaggaaacagggaaagccaaaatgatgggattttggaggggattcaaaagctgttggattcactggatcgggcgcaatttctaaaaaaagagatcgacaaagatttggaaacggagagattgtgtgcattaattgacggattggctattcacgccatcttgaacccaacaagactgacaaaagagcggattatctcgatattggctcatcatatcgacgaaatttgtcatttttaattttcggtacatttaaggggttagaaaacacgccccttttcattcgcggtgtctctcttctatattttgattcattttcaagtataatgtttaagaagttttatgtttcagagcccttgccaaaatgcnnnnnnnnnnacaaagtagagtttagaaattatgaactgagaatttttttaaatattaatggaagagcttcacgaaatttatggtcggaggatgcagtgtttttaaaaaaaatagttaaaaacgagattcaaagtataaaatttaaaaaggttgtatttggaaattcaattgattataaaactaagtttaagtttttactatataagattaagttagataatgcggcttattattttttacaaaaatttttaagtgggaatctgcatactaataaagttatatccaaaaaggagaaaaaatgggtccgttaataagtgttataattccagtttttaatgtagaaagatatttaaaaagatgcttagatagtgtaattaaccaaacatataaaaaattagaaattatcttagtgaatgatggatctactgataaatcaggtgaaatatgtgatagctatgcctcaattgataaaagagtaaaagtaattcataaaaaaaacgggggattatcagatgctagaaacgttggtttacttgaagcaacaggtgattttgttagctttatagacagtgatgattttattcataaggatatgtataaaataatgtattctttaatgaccgagaaaaaaggtgatatagtagaggttggttatcaaaaattttccacagaaatggaaatagaagaacctgattaccataaacaaaatatagatatatatccaacgaaaaaggcagttataaatacgattttagaccataattgtagaaattatgtatggaataaactttataaaatagagttgtgggaagatataaagttcccatacagaaaagtttttgaagatatttttactacgcataaaattattagtaaggctaataaagttgtaaaaaccaacttgaatttatattattattttcaaagaaatgatagtattgttaattccggattttccataaataaaagtttacagcattgtgaagcagtaggctcaatgataaaatttatgaaagaaaaataccccgatttacttccacttgcttatattaaatactatattgattgttttattcgtctttatgagataataaacaatagaaaaaaaataaaggattccaatattattattcataaactttctcaacaaatgttaggatcatctatttttataaaagataatgaagaaataaaaaatctatgcaaaaaatatctggggtataattacgatatatatttaaaaaagagaaaaaagatgctagttgaactttatttattagataagtcaataaccgcctattatatttttaaaaaatctacgattttatgtacaagaacaaaaaatgctcttttatttaaaaaaacataatgctttaaaaagggtgtaaaaattgagcgtaaaaaaaaattatgcttataatttattatatcaattattaacagtgtcgctgcccttaattacagttccatatatttccagagtattaggtagtaatggagtgggtatatatgcttatacttcttcaattgttcagtatttttgtttattgggtatgctaggtataagtacatatggaaataaaagtattgctgtcgtcagagacaatagaaaaaagttaagtgaaacatttttaggtatctatgcaatacaagttattatgtcatttatatctttaactggttattttttgttgatttttgttggattaaaggaagataagtctattgctataattcagtcaataatgattttctcaactgcaattgattgttcgtggctatttagcggattagagaagttcaaaaaaattgtaatgagaaatatattagttaaagttttgactttggttagtatgtttatattcgttaaaactaaatcagatctaccgatttataccttaataatgtgttgtggcacattttttggtcagtttattatgtggctatcagtcggtaaatatatagatttctctaaagttaagattatagaaatatataagcattttagaccaacgttgagctattttattccacagatagcaatacaaatatattttgttttggataaaacaatgttaggagtattatcttcaaaaagtgaagttggtatttatgaatatgcagataaaattttgaaaatttctctcgcctttgtcacttccctagggactataatgctacctagaatggcaaacactttttcaaaaggggactttaagagagctaataagtatctttcttattccttagatttttccacacttattgctattccaattatgtttggattagctggaatagcaaaagagtttattccttggtatttaggtgcggaatttataaaaagcattgtagttttaataattattagtccaacaattttattaatgtcatggagtggagtatttggaacgcagtacttgttagcacttagtaaaatgaggttatactcaatatcagtttatagtggtgccgctgtgaatttaattataaatttgatttttattagcaagatgggatcaattggtgcagcaattggaactatttgtgctgaggctacagtaactttagtccaactaaactatgtaaaacacagtttagatataaaaatggtacttaaaagagcgattaactatttttttgcagggacagtaatgtttggtgctgtacgattattaggaaatatcatgggtgcctcctttttaacaacatttttacaaataataattgggggttttatatatattgcgattttattgttgttagatatttataaacgagaaggactactttacgaagaatttagtaaggtccgtaactcaataaaataactggcttcttattttatttttgatctttggaggatgctatttataatgagctttttgatatggccacttgctatgtttattgcttcctatttcatcaaagttcctaattactttgggagcaaaatacaaatatacatctatttgattttgattattatttatattgtgtttgtttacaaaggaaaagtgcctaaaatacttataagtaaaaaaataatgttatttctctcaataactttggttttgcaatttatagcaatttttataagctattttaaaattgacttaattgattataaaaataacccaattaagatgtttattaatttttgtatattctttttggttatttttatacactattatatcatgctaattagtacgagttcctttaaaagttcaaaggcttttgtaaagggagggctatttgcccttataatatcttttatagtggctagttgtcagttaacctatatttttttcccaagtatttcagagagtatagtttcatttattggcaaattttttgaagccagatggaaagatcaacaaattagttctaatccatatggttattatagccaaggtagttacgtacaaacactaaaaaggattaatggcttaacagaagaagcatctaattttgttactcaactgtttattggatttacaccatttttaatagcatcggtaaaaaataaatataatgtttttcaaactaaaaaagataatctcttgctagtgtatgttttattaatcttaagttttgttttctttattatggcacaaacaacgtccggatttttatttgcttttattgtttttcttgttctttatagacatatgagtaaatacgcaaaatatttctttctgagtgccggagttttaataactttgcttgtgcttggctataatataaaaaataattatatagctgatgcttttaataattatatttttaataaacaagggaattcaaatataaatagagctggaaatacactagctctattaaaaatttttatttcaaatatttttattggagttggttttgacaatcaatcttattttttatatataaatttgccagagtgggctcgacataatagtgaatattttatgagagtgcagaataagtactttcctgttttaagcgtatttttaggttggttatctagttttggtatcttaatagtatcttttgtgtttatatatatatataaattcttaaagaaatttaaagcaatcactataactgctcagaatatgaaccatccagagagtatatatatgaagactatttatgattcatctttttatttcttttgttttacttttattagttctttattcgcttatgtgtggtatgcaagtatttatttaattctctttttctttttcatatgtttttattaccatgcagaacatgttatatataaaagacctgaatccgtgacgaaaatataacaaacgcgttaataggtagggcttgctgaacgaatcaaatttggtcagatacaagccaaattccgattatcaaaatataaaatagtgttgtgtaaaaatttcaaaaaaagaaccnnnnnnnnnngaaaaacttgacacatactgagatcacctgaatgtggaatgaatttaatttgtctgatatactaattatactaaattttatgcgatttgtttgcctttaagcggaaatttcgtcacggattcaggtatatgacaaaaaacatttgtccaattttcttcaaaggggattactaccctattagtgcatcggaaaaaatcatagataaaagcaatataaaagaaggagataagagtaaattgagagaatttttgtgtgatgtgtcacgtcatggatttgatagattgaaagacttaaaagtggattgcaaaggaagagaaaaggaaaagtacagtaaatataaaattgataagtttacaaagatgttagaagactagggaattaatccgattccaatacccaagcatgatgcagaaaagttggggaaagataaatggataaaaaaccctatatattttagggaaaaaaccattggcgagatttagaggaagtctgttaaaatggatggtgaggaataaggaaattttattctctgtaaataagaacgtgtctattgtataattaaatttcattataaatttattttttacaattatttttgtatgtaaatttgataattttgtttgggggtataagaattgattaataatgagccatacaaaattgtctctctcttcagtggttgtggaggtttagacttaggtcttgagatgtcaggatttaaggttgtttgggcaaatgatattgataaacatgctgtaactacttaccaacataatatcggaaatatagtagaaggggatataagaaatattgatttaaaagatatccctgattgtgatgtattagtagcaggttttccatgccaaccgttttcttcggctggtaatcggttgggtgtagaagatgcaaggggaacactttacgaagaatgtctgagggttataaatgacaaaaaaccaaaggctgttatctttgagaatgttagagggattttgtcaactaaaaataaagatggttctttgttgttgcattctatcgtaaatttcttagaagcaattgaacctggttatagtgttcaatataagctactgaaagcaagtgattatggtgttccacagcaaagatacagggtagtttttgtggcttttaggaacgacttaaatgtgaaatatgaatttccaagacctactcattctcccgatgacccttctttaacagttggaaatataataaatgttccagcaggaacaccaaaccaagatgaagtatgggagttctctccacaatcgaaggcattaattccttatattagtgaaggtggttcatggaaagacatcccttacgaaatacttcctccacgtttaaaaagaataagagataatatgaaaaaatatagagcacctaacttttatagacgtttcgcaagaaatgagataaatggaacaattacagcggccgctactcctgaaaactgtggtattatacatcctcttgaagataggagatacagtgtaagagaggtagcaagaattcaatcctttccagacgattttgtatttgttagtgactcccttgcttctaagtatagaatgataggtaatgcagttcctccccttcttggaaaggcagtaggacattctgtaaaaaaatgcttagataatgctttgaatccaaacaataaggaaggaaaaattaatacggaagatgaagtaattgtttctgagtatggacaagttgcgtttaatttctaaggtatcttcatgcgaagatgcctttttgtttgggcttttgatgctagtatagtttcatggacaccctttagtgaaatataatattaacgaagggatgtgtcctgatatgggtaacacaagcgaaaaacgtaaaagttatcatgctgaatttaaagaaatggtggttgagctttatcaaactggaacaccagtaaaacagatctgcagcgaatatggcctgtctgaaacgacaatctacaaatggatcagaaaacaaaaaccggttaagctggatgacgggagctcttttaccccggaagaatttctgaacctgcaaaaagaattgcaccggctgaaagaggaaaacgaaatcttaaaaaaagctatggccatattcgcaaagaagtagatcaaacnnnnnnnnnnggtgtggcaggcttgtttgccatgcgaaagaaatcattgcccctttcgcccttcgcataacaccacgcccgcagaggctccatgtcaagcgaccagcgatgtcatgaaaaatatggcatgagatcaaaattaaatttcacttattggtgtccaaaatattgacttaaatccagatatctatactttggatgcatttgtagtaattctgatacggtcacaaatttatatcctcttttttgaagttccggtaaaattttttttagtgcttcaatcgtttgacgacggtctccgccgttatcatgaaataagacaatatccccatttcgggcgttagataaaaccttttttacaatattatgaacgcccggttttttccaatcatacgtattttgatgccatgaccatatcacaaccgtataaccttcttggttcgaaacattaataatggtttcattataataacctcctggcgggcgaaacaatttaggagaatatccagtcaattgcgtaatcgtttgttttgtttttcttaattcatttctaatttcttcctcgttaagccccctaaaaccggaatgatggtatgtatggttcgctaattcatgtccatccaaaatttctcgtttcactacatcaggatgagcttttacacaggtccccaccacaaaaaaggttgctttagcatgatattgttttaaaatatccagaatttccggagtatattttgaactaggtccatcatcgaatgtcaatgcaatgactttttgtttggtcggtatttcccaaatggcttttccgtgttcttcataaaactttcggcctctattcaaatcgttcgcttttacgaaaactgtacaaataaacgacagagcaaccgaacaacctatgatcaagatacaccataggacgaactttttgttgatcatcaagcaacaacacctttcgtgtaaattcgttgtttaggttaggatgtttcaaaatcatgtctgcaagaatgattcttccattgttatttttcacatccattcaaatggaaaaaattcaagcgccgtttacatacgatgccaacaaagaatggaactctctcccaattcacatcacgcatcttttactcatttttcgtctcccttattttgttcagatgattaatttttatcgaaaacagattatgccaaagcaactggacaaacattgttgactactgtattttgcaatagaaaannnnnnnnnnaattcttcccggtaaatacttattatagcgcgaatattctacaacccttggtttatgaatccatgttttaattattgaaagccatggtaaagcttttcgctttttcatatatggccgatagtcatccaataatatctccccattaggtgaaacaatctttaattgatcccatgttaatatcatttgtaattgactatagttgccacccttagggacatgaaccaacgtctgatccactttcacttcattatatttgtttactttaacaagatgttctttaaatacaggatagggcttttccggtaaggctagaagataatcccgttcttcctgccataagtcctcaatacgtacgtttttggcataatgaattctatttctgtccgcctctaatttatgaaataattgatcagttaaaccctcatagctgtccattattggagctgaagtaaaaaagttatagcgtatatatccaactttattctcaacatttcctttttcatggccacttcttggattgcatacctgcacatcaaagccataataattctgaaattgaacaaattcatcagttaattgtgcttcttcattttttgtcctttttttcttcacagcgggggttaaattatcgattcttatccttttaggtacccccccaacctgtttaaaaagaatattgagaccatgtaagaagcattcttgattttcagctggtaacggtactgcaaatccagcattactatgaggaaacgtcataattaaagcatgaatatccacaatttctccatcttgtacagcttccattactccaaagtctacttgagcttcacccggagggtgttctaatctttcataccctttatccttttcttcttggtgagtattcatccattcagagataaagtaacaaacagtacgataagaaccttggaaacccatttcctttagttcttcaaatatttgtttctttgttcttcttaattttttccttaactttaaatcctcaaacagccaatctgaaacaattactccccatttttcctcatacatcatccctttctttttaaatgctttctgtttagggagttgattttcatccgcatacttcttagctgttcgccaattaattcccattgttctttgtatttctgaaatagnnnnnnnnnnagttatcatgctgaatttaaagaaatggtggttgagctttatcaaactggaacaccagtaaaacagatctgcagcgaatatggcctgtctgaaacgacaatctacaaatggatcagaaaacaaaaaccggttaagctggatgacgggagctcttttaccccggaagaatttctgaacctgcaaaaagaattgcaccggctgaaagaggaaaacgaaatcttaaaaaaagctatggccatattcgcaaagaagtagatcaaaccactgttatatccatgattgacgagataagagccaaacaccattatgaccttaaaaccatgtgtacggtccttggcgtgccgagaagtacctactatcaatccaaacaaaaaaaagagtcaaaaacaaaacgggaaaaccgggagttgacagacagaatacgaaaaatccatacggaaagcaagcagaggtacggagcgccgaagatccgccatatgcttgaaaaagaagggctcaaagtcagcctgaaacgggttcagcgtttgatgaaggctgcaggcatttattccattatcagaaaaaagtaccgtccccattccaataagggcaagatggaagaacacgataacctgctgaaccaggacttctcaacgacaaccatcaacgagaaatgggttacggatattacgtacattcatactttgagagacggttg
